United States Patent Application Publication US 2005/0203280 A1 - sequence listing, part 2

SEQ ID NO: 1858 - protein, 107 aa, Alloiococcus otitidis
MNTKKSPSKLAAFPTTLKQAFTLACGQNTALIKAQPPSCGTFIPRATKLSKALAKGQEHLILETDKGSFLKWKVTTPHQPSNPMKGQQRVSAGSSVTSSPLGPNPLP

SEQ ID NO: 1859 - DNA, 2268 bp, Alloiococcus otitidis
  CDS (52)..(2265)
cttggggctaactttaacccgagacatcctcaaagagaaaggactggtctaatgaaattacaagctatgactgcccaagaagtaaaagattccaagacttacttggaatggggtttgtctgaagatgaataccaagaaatcaccaagcaaattggccgccttcccaactacactgaaacaggcatttactctggcatgtggtcagaacactgctcttataaaagctcagcctccatcttgcggaacttttatacccagggcgaccaagttgtccaaggccctggcgaaggggcaggaacacttgatattggagacggacaaggggtcgtttttaaaatggaaagtcacaactccccatcagccgtcgaaccctatgaaggggcagcaacgggtgtcggcggggtcgtccgtgacgtcttctccattggggcccaacccattgccctagtcgattctctccgctttggtcctttaagcgacagccatgagcaaaagctggtttcccaggccatcaaagggatagctgactacgggaacattttgggtattccaagtcttgctggtgagttgaaatttgatccagcctaccgcaaaactcctttaatcaacgccatgtgtgtaggcttagtagatgttgacaaaatgcacaaggggctagcctctggggttggcaacaagctcctatacgttggggcgacaactggtcgtgacggcatccacggggcttccttctcaagtaaggaagtcactgatgaaggtcaaggttcagcagtccaggcaggggacccccacaaggaagaagttctgatcgatgcctacatgaccatgttggaccgctatcaagatggcatcattggcatgcaagatatgggagcagctggtttagtttcttctagctccgaaatggtcgaaaaagctggccttggcttgtctctaaacatggaccaggtgcctatgcgggaaaaagacatgacagcctacgaattattattgtccgagtcccaagagcggatgcttttgtgtgtcaaaccagactatgtggaagacattagccaaatattctggcaagctggattagaagccagtgtcattggtgaagtgactgaaggtgaccgctaccaagtcttccagcagggtgaaaaggttgtagacttaccggttaaaagcctggcttcaggtgtgccggagttaacttatgaagctaagcaaccagaatggatggcttctgaccaggaggacgactataaacccgtgatttcttcaattgaagaagccagcttaagcatccttgcatctgatgacttctctagcaagcagtctgtctttaaccagtttgactctctggctaagaaccagaccctccgtcaacctggctccgatagtggtctcgtcaaaattccaaataccgataaggcagttgccctaacagctgatggcaacagtcgctatgtgtatttgaacccggaagtcggcgggcaaattgcagtaagtgaagcggcccgcaatattgttgccagtggagccaaacccttgggtatgacagatggattaaactatgggaatatcaacaacccagaagtttactacagctttgaacaatcctgcttgggcatcagccaggcatgtgaggtcttagacacccccgttgtatcaggcaatgtatccctcaacaatgggccgtttgacaccccaatctaccctagtccgattgttggcatggtgggtttgctcaaagactaccgtaaagttttggccaatcaatttaccagtggtgaccaagctatctacttgcttggcgagactggggccgattttgccggcagtttgatccaaaaaattcaagaagatcgaatctttgggtctccacgcatcaatctttaccaagaaaaacaaaaccaagattttgttttggctgctaatgaccagggcttgttggcagcgagccatgacgtgtcagaagggggactttttgtccacttgctaaaaatggcttttggcactgattatgcctttgacctagatagtgacttgaccaaggaagacctctttagtgagactcagtcccgctttatccttgcagtggatgcaagcaagcaggccgactttgaagctcttgctaaagaagcggaccttgaagtccaaaaaattggtcaaaccaaagaagccgatcaaatcaaagtgaatttagcagatggaacacgggaagaattgtccaagaaagaattagaaattatctggtcccaagcctttgaccagaaatttgactaa

SEQ ID NO: 1860 - protein, 738 aa, Alloiococcus otitidis
MKLQAMTAQEVKDSKTYLEWGLSEDEYQEITKQIGRLPNYTETGIYSGMWSEHCSYKSSASILRNFYTQGDQVVQGPGEGAGTLDIGDGQGVVFKMESHNSPSAVEPYEGAATGVGGVVRDVFSIGAQPIALVDSLRFGPLSDSHEQKLVSQAIKGIADYGNILGIPSLAGELKFDPAYRKTPLINAMCVGLVDVDKMHKGLASGVGNKLLYVGATTGRDGIHGASFSSKEVTDEGQGSAVQAGDPHKEEVLIDAYMTMLDRYQDGIIGMQDMGAAGLVSSSSEMVEKAGLGLSLNMDQVPMREKDMTAYELLLSESQERMLLCVKPDYVEDISQIFWQAGLEASVIGEVTEGDRYQVFQQGEKVVDLPVKSLASGVPELTYEAKQPEWMASDQEDDYKPVISSIEEASLSILASDDFSSKQSVFNQFDSLAKNQTLRQPGSDSGLVKIPNTDKAVALTADGNSRYVYLNPEVGGQIAVSEAARNIVASGAKPLGMTDGLNYGNINNPEVYYSFEQSCLGISQACEVLDTPVVSGNVSLNNGPFDTPIYPSPIVGMVGLLKDYRKVLANQFTSGDQAIYLLGETGADFAGSLIQKIQEDRIFGSPRINLYQEKQNQDFVLAANDQGLLAASHDVSEGGLFVHLLKMAFGTDYAFDLDSDLTKEDLFSETQSRFILAVDASKQADFEALAKEADLEVQKIGQTKEADQIKVNLADGTREELSKKELEIIWSQAFDQKFD

SEQ ID NO: 1861 - DNA, 1464 bp, Alloiococcus otitidis
  CDS (454)..(1461)
cctaaaaagaaaggagcccagcttttgtttgctatatggaaccacccccaagcaggacaggtaagccagttcgccttgctcaacctgcaacatcggggccaacaaggggcaggtattacagtttttgaccaggaaaaagggacctggttgacccacaagggacctggcttggtcaacgaggttttcgaacacaaggaaacccttgaccgcttagctggtaattgtgccctggggtctgtccactactcttcccaaaaacaactccaagaccaaaccgatattaaccctatccgtttttcatttttagatgaatcctttgctatcgctttttcaggccatatcgtcaacgccaaaagtttgcggcaggagctggaaaaccaaggaagtatcttttactcgaattcggatggcgaggtcttcgcccacttgatccgtcacagcaaggaagagtccatggcagataaaatcaaggaagcctgccaggctgttaagggtggctattccgttagcttgctgaccgaagaagggatttatgcctttgtcgacccagcaggcctgcgcccccttgtggtgggccagctgaaccaggggaatccatcctacctggtgacaagcgagtcttgtgccttgaaaggcttgggggctgaccaagtctatgaattaggacccggacagggagtctttatcgatgattcaggctaccaggtctttaaccatgttgaccatcctggacccaacaaggtagaagccatggagtatatctattttgcccgaccagactccacaatagctggcgttaatgtctacctggcccgtaaaaacatgggccgctacctggccaaggaagatgaaggcacccagggcgacttggtcatgggggtccctaattcctctttaatcgctgccagtggttatgctggggagaaggggatttcctacgacttaggcttggtcaaaaaccagtatgtcggtcggacctttatcgaacccagccaagagttgcgagagttgggggtaaaaaataaactatcggtgatcagccaggcagttgaagataaggatatcatcttgattgatgactctatcgttagagggacaaccagcaagcgaatcgtcaaactccttaaagaggctggggctcacaaggttcatttacggatctcctcaccccctatccttttccctaattattacgggatcgacatgtcaacgtccaaggaattaattgctcaagaccggactgtccaggaaatgactgattatatcggttgtgattccctagccttcctatcgattccggccctcaagcaatctgtccaggactataatccggacatcgacttgtccctttccatttttaacggggactaccatgaaggcttgggcgaccaccaaaactatttagaaaaacacctgtcgagcaagcaaatggcccaattacaaaaaggaggaagccatgtctga

SEQ ID NO: 1862 - protein, 336 aa, Alloiococcus otitidis
MADKIKEACQAVKGGYSVSLLTEEGIYAFVDPAGLRPLVVGQLNQGNPSYLVTSESCALKGLGADQVYELGPGQGVFIDDSGYQVFNHVDHPGPNKVEAMEYIYFARPDSTIAGVNVYLARKNMGRYLAKEDEGTQGDLVMGVPNSSLIAASGYAGEKGISYDLGLVKNQYVGRTFIEPSQELRELGVKNKLSVISQAVEDKDIILIDDSIVRGTTSKRIVKLLKEAGAHKVHLRISSPPILFPNYYGIDMSTSKELIAQDRTVQEMTDYIGCDSLAFLSIPALKQSVQDYNPDIDLSLSIFNGDYHEGLGDHQNYLEKHLSSKQMAQLQKGGSHV

SEQ ID NO: 1863 - DNA, 1464 bp, Alloiococcus otitidis; identical to SEQ ID NO: 1861
  CDS (25)..(1461)

SEQ ID NO: 1864 - protein, 479 aa, Alloiococcus otitidis
MFAIWNHPQAGQVSQFALLNLQHRGQQGAGITVFDQEKGTWLTHKGPGLVNEVFEHKETLDRLAGNCALGSVHYSSQKQLQDQTDINPIRFSFLDESFAIAFSGHIVNAKSLRQELENQGSIFYSNSDGEVFAHLIRHSKEESMADKIKEACQAVKGGYSVSLLTEEGIYAFVDPAGLRPLVVGQLNQGNPSYLVTSESCALKGLGADQVYELGPGQGVFIDDSGYQVFNHVDHPGPNKVEAMEYIYFARPDSTIAGVNVYLARKNMGRYLAKEDEGTQGDLVMGVPNSSLIAASGYAGEKGISYDLGLVKNQYVGRTFIEPSQELRELGVKNKLSVISQAVEDKDIILIDDSIVRGTTSKRIVKLLKEAGAHKVHLRISSPPILFPNYYGIDMSTSKELIAQDRTVQEMTDYIGCDSLAFLSIPALKQSVQDYNPDIDLSLSIFNGDYHEGLGDHQNYLEKHLSSKQMAQLQKGGSHV

SEQ ID NO: 1865 - DNA, 1068 bp, Alloiococcus otitidis
  CDS (52)..(1065)
aaaaacacctgtcgagcaagcaaatggcccaattacaaaaaggaggaagccatgtctgatttatacaaagaagccggcgtggatatcgaaaaaggatatgaatcagttgaccgtattaaaagccacatcgacaagactttaaacaagaacgttctaagccagctcggtggctttgccggctcctactccctgaaagactttgactttgaccaccccgttttggtatctggaacggatggggtaggaaccaaaattttactggcccagcaggctgacaagcatgacaccatcgggatagattgtgttgccatgtgcgttaatgatatcctcgcccagggtgccaagcccctctttttcttagactacctagcccttggtcaaaacaagcctgaccgggttgaaaaaattgtcgctggtgtggcccaaggatgtcaggaaggggatatggctttaattgggggtgagaccgccgaaatgccggatatgtacgacttagacgagtatgatttggctggctttgctctagggattgccgacaaggaccagatgatggaccccaaccaggtcaaagagggagactacctcctaggcctaccaagctcaggccttcattccaatggttactcccttgtccgcaagctttttttcaaagaccgtgactatggctttgaccaccaattggggaatggcaaaagcttaatcgaagaattactagaacctacccggatttatgtaaaagaagttctccctctcattcaggaagatttattatccggcattgcccacattaccggtgggggcttctttgaaaatgttccccgcatgctaccagaccaattaagtgctgttatcgacaccagtcaaattccaaaacaagagattttcacccttttaagtgacctgtctgaaatgagccgggaagacctttatgggacctttaacatgggggttggcatggtcttagcggttagtcctaacaagaaagaccaggttctggacaaagtccaagatgcctttgtcctgggacaggtaaccgatgaaaaagatgaaaaacttgttttaaaatag

SEQ ID NO: 1866 - protein, 338 aa, Alloiococcus otitidis
MSDLYKEAGVDIEKGYESVDRIKSHIDKTLNKNVLSQLGGFAGSYSLKDFDFDHPVLVSGTDGVGTKILLAQQADKHDTIGIDCVAMCVNDILAQGAKPLFFLDYLALGQNKPDRVEKIVAGVAQGCQEGDMALIGGETAEMPDMYDLDEYDLAGFALGIADKDQMMDPNQVKEGDYLLGLPSSGLHSNGYSLVRKLFFKDRDYGFDHQLGNGKSLIEELLEPTRIYVKEVLPLIQEDLLSGIAHITGGGFFENVPRMLPDQLSAVIDTSQIPKQEIFTLLSDLSEMSREDLYGTFNMGVGMVLAVSPNKKDQVLDKVQDAFVLGQVTDEKDEKLVLK

SEQ ID NO: 1867 - DNA, 612 bp, Alloiococcus otitidis
  CDS (31)..(609)
aaaacttgttttaaaatagggggttacaagatgaacatcgccctttttgcttcaggcagggggaccaatgtccaggctatcttagaccaaaccaagcctgaccatgtcccggtccaggcccagtgcctggtctgtaatgatccggaggctcctgttattggactggccaaggaatacggcttgccaatccttgtcctagactccaaagggattagccggacagactgggagagggaggtcttggcttatttgagccagtatgagatcgactatattgtcctagctggctttatgcgtttacttagcccaagctttattgaccattttcaggaccggatccttaacatccacccctctctcctgcccaagtatccagggaccaagagcattgaagaagcttacgacaaccaggaaaaagaaacgggggtcaccatcttttatgtcgatgacggggtggataccggccaaatcatcgaccagagaagaatcaagcttgaccccgcttggtccctagcagacttggaagaccaaatccaccgagtcgaacatgaaatgtacacacaagtcttgacccaactagcccatgaaggagaggatgtaaatgacagctag

SEQ ID NO: 1868 - protein, 193 aa, Alloiococcus otitidis
MNIALFASGRGTNVQAILDQTKPDHVPVQAQCLVCNDPEAPVIGLAKEYGLPILVLDSKGISRTDWEREVLAYLSQYEIDYIVLAGFMRLLSPSFIDHFQDRILNIHPSLLPKYPGTKSIEEAYDNQEKETGVTIFYVDDGVDTGQIIDQRRIKLDPAWSLADLEDQIHRVEHEMYTQVLTQLAHEGEDVNDS

SEQ ID NO: 1869 - DNA, 1602 bp, Alloiococcus otitidis
  CDS (1258)..(1599)
atgacagctagcgacaaacgctttgccctattgagtttatccgacaaggaaggccttagctctcttgcccaggcctttgtagatgctggcattcacttaatggcaacgggtgggacctaccaggcccttaaagaggcagacttacccgtccaagcggttgaggactttaccggggtcaaagaaatgctggatggccgggtcaaaaccctgcatccaaaaatccatgggggtcttttagccgaccgcagcaagccggaccaccttgccaccatggccgaccaagccattcccaatattgcttttcttgtggtcaatctctacccctttgcagaagtggtggcccaggatgcttcaaatttcgaccgggctattgaaaatattgacatcggggggccaaccctgttgcggtcagctgctaaaaaccatgccagcctgactgtattaacggacaagcgggactaccctcttgtcatggaagagctaaaagcccaaggcaaaacctccctgtccactagaagttacttagccagcaaggtcttccaactgactgcacactatgaccaagaaattgctaactaccttgcccaggccaagcaaggccaggtgtccgaccaaggccaggactggccctttatcagccaaacttatgacttgaaagccagccttccttacggggaaaacagccagcaaaaagcctggttttacacagacggtcaggctagccaggctagcgttgctggggctaagcagctaaatggcaaggccctatctttcaacaacattaaggatgctgatgtggccattaatatgctagccgactttcctgaccaagctactgcgattgccatcaagcacatgacaccctgtggggttggacgaggggacaatatccaccaagcctttgaccgctgttaccaggctgattccaagtcgatctacggtggcattgtttcatttaaccaagtagtcgatgaaagattggctcaaagcctgtccaagattttcttagaaataattgtggcaccgggctttaccgactcggctctggcgattttaaccaagaagaaaaaactccgcctgctcgaaattgacctgccagaaaaaaaccaggcaagaccacagcaagtgtcggtttctggtggtctactcatccaagagcccgaccagtcaaccgagctagacttcccgcttggccaaaaaccaagccagtggacctattatggagaggaccaatacagttcggatgacctccagaccatggcctttttgatgaaggtggtcaagtacgtgaaaagtaatgccattgtggttggagctggccagatgaccttaggcgttggtggtggccagcctaaccgggtcaattctgcccagatcgccctggaagagatgaaggccaaggacttagagactgacagtaaaatcatcctggccagtgatgcctttattcccatgcgggatacggtcgatttagccagccaatatggggtagacgttattgtccagccgggtggctccatccacgatgatgatgtgatagccgcttgccaggaaaaaggcattgacctagtcatgaccggctaccgccactttaagcactaa

SEQ ID NO: 1870 - protein, 114 aa, Alloiococcus otitidis
MAFLMKVVKYVKSNAIVVGAGQMTLGVGGGQPNRVNSAQIALEEMKAKDLETDSKIILASDAFIPMRDTVDLASQYGVDVIVQPGGSIHDDDVIAACQEKGIDLVMTGYRHFKH

SEQ ID NO: 1871 - DNA, 1602 bp, Alloiococcus otitidis; identical to SEQ ID NO: 1869
  CDS (1)..(1599)

SEQ ID NO: 1872 - protein, 533 aa, Alloiococcus otitidis
MTASDKRFALLSLSDKEGLSSLAQAFVDAGIHLMATGGTYQALKEADLPVQAVEDFTGVKEMLDGRVKTLHPKIHGGLLADRSKPDHLATMADQAIPNIAFLVVNLYPFAEVVAQDASNFDRAIENIDIGGPTLLRSAAKNHASLTVLTDKRDYPLVMEELKAQGKTSLSTRSYLASKVFQLTAHYDQEIANYLAQAKQGQVSDQGQDWPFISQTYDLKASLPYGENSQQKAWFYTDGQASQASVAGAKQLNGKALSFNNIKDADVAINMLADFPDQATAIAIKHMTPCGVGRGDNIHQAFDRCYQADSKSIYGGIVSFNQVVDERLAQSLSKIFLEIIVAPGFTDSALAILTKKKKLRLLEIDLPEKNQARPQQVSVSGGLLIQEPDQSTELDFPLGQKPSQWTYYGEDQYSSDDLQTMAFLMKVVKYVKSNAIVVGAGQMTLGVGGGQPNRVNSAQIALEEMKAKDLETDSKIILASDAFIPMRDTVDLASQYGVDVIVQPGGSIHDDDVIAACQEKGIDLVMTGYRHFKH

SEQ ID NO: 1873 - DNA, 1248 bp, Alloiococcus otitidis
  CDS (1)..(1245)
atgtcaaaaaggatattgattgttgggtctggtggcagagaacacgccattgccaaggccctggaccaaagcccgcaagttgaccgcatctacctggctcccggcaatcccggtgtattagccaatacccaaaaaacccagttagtggctattgaccaagaagattttgcatctttattagacttggttgaccaagaaagcattgactggaccattgtgggacctgagaaggtcttagaagctggcatagtagatgctttccggcaagcaggtcaaaccattattggaccgagtcaagcggccacccaaattgaaagctccaagtattttgccaaacaagttatggcccaagctggggtagccactggcagctttcggctttttaaccaggacaaacaggatgaagttgaagattatattaccagccttccccttcctatcgtccttaaaaaggatggcctagcttctggcaagggggtttacatctgccagacctatgaggaagccttgactaaggcccaggacttgttagattcacctgaccaagaccttattgttgaagaatttttagacggggaagaattttcccactttgccctggtcaatgaatcccatattatccctctcggcttggcccgggaccacaaaagagcctatgacgggggtaagggtcctaacaccggtggcatgggggcctactcgccagttaccgaccaggaccaggctttcagccaggaaattgtagaccaaattgtccagccggttgctgaccaaatgaaggacttgggccagccctttactggcgttctcttcactggattgatgcgggtgaatgatcggttttatgtaattgaattcaatgcccggtttggcgatcctgagacccaggtccttttgccccggcttgaaactgacctagtagacttgttccaagcccacctcaatcaaacagaagtccaagttagctaccagccaggttgcagcctgggtgtcatcctagcatcggctggctaccccggccaagtggatgacggcaaggacttgaactgggccggtgaagtggaccaggccaacttggtttattctggtgtcgcagaaaaccaaggccagctggtgaccaagggcggtcggattttgatggtccaagccatgaccgattccctccaaaccagtcgccagcaagtctatgatgttttagccaagcaagatgtcgaaggcagtttttaccgtaaagatattggtttataa

SEQ ID NO: 1874 - protein, 415 aa, Alloiococcus otitidis
MSKRILIVGSGGREHAIAKALDQSPQVDRIYLAPGNPGVLANTQKTQLVAIDQEDFASLLDLVDQESIDWTIVGPEKVLEAGIVDAFRQAGQTIIGPSQAATQIESSKYFAKQVMAQAGVATGSFRLFNQDKQDEVEDYITSLPLPIVLKKDGLASGKGVYICQTYEEALTKAQDLLDSPDQDLIVEEFLDGEEFSHFALVNESHIIPLGLARDHKRAYDGGKGPNTGGMGAYSPVTDQDQAFSQEIVDQIVQPVADQMKDLGQPFTGVLFTGLMRVNDRFYVIEFNARFGDPETQVLLPRLETDLVDLFQAHLNQTEVQVSYQPGCSLGVILASAGYPGQVDDGKDLNWAGEVDQANLVYSGVAENQGQLVTKGGRILMVQAMTDSLQTSRQQVYDVLAKQDVEGSFYRKDIGL

SEQ ID NO: 1875 - DNA, 384 bp, Alloiococcus otitidis
  CDS (61)..(381)
tcactactttcaattgaattttgtttcattgtttcggacaagtcgactagtttttggtggatgttttcatcttcaatggataaaattttagccgccatgattccagcattacgggctccacttggtccgatagccatagtggctacgggaactcccttcggcatttggacgatggataagagggagtcgatcccattgagggttgagcttttaatgggaacgccgatgactggcagggtggttgaagcggcaaccatacccggtaggtgggcagccccgcccgcaccggcaataataaccttaatacctttgtcccttgcttctttactaaagctattcatctcatcggtcatccggtgggccgaaataacgctcttgtggtag

SEQ ID NO: 1876 - protein, 107 aa, Alloiococcus otitidis
MFSSSMDKILAAMIPALRAPLGPIAIVATGTPFGIWTMDKRESIPLRVELLMGTPMTGRVVEAATIPGRWAAPPAPAIITLIPLSLASLLKLFISSVIRWAEITLLW

SEQ ID NO: 1877 - DNA, 504 bp, Alloiococcus otitidis
  CDS (19)..(501)
agtataggaggtcttaaaatggaaaaagttgcagtgattatgggtagtaaatcagattgggaccagatgaaaccagcttgcgatcaattagatgagctagggatagactaccacaagagcgttatttcggcccaccggatgaccgatgagatgaatagctttagtaaagaagcaagggacaaaggtattaaggttattattgccggtgcgggcggggctgcccacctaccgggtatggttgccgcttcaaccaccctgccagtcatcggcgttcccattaaaagctcaaccctcaatgggatcgactccctcttatccatcgtccaaatgccgaagggagttcccgtagccactatggctatcggaccaagtggagcccgtaatgctggaatcatggcggctaaaattttatccattgaagatgaaaacatccaccaaaaactagtcgacttgtccgaaacaatgaaacaaaattcaattgaaagtagtgatcaacttgactaa

SEQ ID NO: 1878 - protein, 161 aa, Alloiococcus otitidis
MEKVAVIMGSKSDWDQMKPACDQLDELGIDYHKSVISAHRMTDEMNSFSKEARDKGIKVIIAGAGGAAHLPGMVAASTTLPVIGVPIKSSTLNGIDSLLSIVQMPKGVPVATMAIGPSGARNAGIMAAKILSIEDENIHQKLVDLSETMKQNSIESSDQLD

SEQ ID NO: 1879 - DNA, 1179 bp, Alloiococcus otitidis
  CDS (121)..(1176)
aacaaaattcaattgaaagtagtgatcaacttgactaatgaaccattattgccaggatctaccattggcatactcggcgctggccaacttggaaaaatgttgacccaatcagcccaaaaaatgggctaccatgtccatgtctttgataccaaagaagcctgcaccttccctattgctcacaaaagtgtcttgggtgactttagcgacaaggaccaagtcttgaactttgcccaagaagtggacagcttgacctatgaatttgaaaacatcaatgctgaagttttagaagacttgtccaaccaagattactttatccaaggggctaaactgctaaccatctccaaaaaccgcttgcgggagaaaaaatggttaaatgacatcggcactccaacagtcccttaccgacctatcaataacttggacgaactcaaccaggcttcagctgacttaggcttgccgatagtcttgaaaacagtcgaattaggctatgacggcaaaggacaagttttgatcaaagacgaaagtgatttaaccgaccaagccgatgacattaagtccatcctagacagcggtggcgtagcagaagccttttgtgacttcgactatgaagcatctgtgattgtagcccgcaacccacaaggagaaattgagtgcttcccaccaactgtcaatatccaccgggctggtatcttgtgtgctagctattcttctagccagctcaaagaagaattgtttgatgatattaaagctgtggcaacaaccatcgccaaagaatccgacttggtaggggtttgcggtgttgagttgtttgttactaaagaccaagaacttattgtcaatgagattgcacctcggccacacaactccggccactattccattgaagcctgcaatttatcccaatttgaccaacatatcctagccattaccaaccgtgaattgatcgaacctagactggtccaacctaccctgtctgttaatatcttgggtcagcaccttgaccacttgagagaattagtggctaaattcccccaagctattgtccatatctacgacaagggcgagggtcggacccaacggaaaatgggccacttcaccctatcatttgaaagtgaagaccaaattgcagaaacattaaaggatcctttcttacaagactggttcgaccaggttggctag

SEQ ID NO: 1880 - protein, 352 aa, Alloiococcus otitidis
MGYHVHVFDTKEACTFPIAHKSVLGDFSDKDQVLNFAQEVDSLTYEFENINAEVLEDLSNQDYFIQGAKLLTISKNRLREKKWLNDIGTPTVPYRPINNLDELNQASADLGLPIVLKTVELGYDGKGQVLIKDESDLTDQADDIKSILDSGGVAEAFCDFDYEASVIVARNPQGEIECFPPTVNIHRAGILCASYSSSQLKEELFDDIKAVATTIAKESDLVGVCGVELFVTKDQELIVNEIAPRPHNSGHYSIEACNLSQFDQHILAITNRELIEPRLVQPTLSVNILGQHLDHLRELVAKFPQAIVHIYDKGEGRTQRKMGHFTLSFESEDQIAETLKDPFLQDWFDQVG

SEQ ID NO: 1881 - DNA, 1179 bp, Alloiococcus otitidis; identical to SEQ ID NO: 1879
  CDS (97)..(1176)

SEQ ID NO: 1882 - protein, 360 aa, Alloiococcus otitidis
MLTQSAQKMGYHVHVFDTKEACTFPIAHKSVLGDFSDKDQVLNFAQEVDSLTYEFENINAEVLEDLSNQDYFIQGAKLLTISKNRLREKKWLNDIGTPTVPYRPINNLDELNQASADLGLPIVLKTVELGYDGKGQVLIKDESDLTDQADDIKSILDSGGVAEAFCDFDYEASVIVARNPQGEIECFPPTVNIHRAGILCASYSSSQLKEELFDDIKAVATTIAKESDLVGVCGVELFVTKDQELIVNEIAPRPHNSGHYSIEACNLSQFDQHILAITNRELIEPRLVQPTLSVNILGQHLDHLRELVAKFPQAIVHIYDKGEGRTQRKMGHFTLSFESEDQIAETLKDPFLQDWFDQVG

SEQ ID NO: 1883 - DNA, 1179 bp, Alloiococcus otitidis; identical to SEQ ID NO: 1879
  CDS (22)..(1176)

SEQ ID NO: 1884 - protein, 385 aa, Alloiococcus otitidis
MINLTNEPLLPGSTIGILGAGQLGKMLTQSAQKMGYHVHVFDTKEACTFPIAHKSVLGDFSDKDQVLNFAQEVDSLTYEFENINAEVLEDLSNQDYFIQGAKLLTISKNRLREKKWLNDIGTPTVPYRPINNLDELNQASADLGLPIVLKTVELGYDGKGQVLIKDESDLTDQADDIKSILDSGGVAEAFCDFDYEASVIVARNPQGEIECFPPTVNIHRAGILCASYSSSQLKEELFDDIKAVATTIAKESDLVGVCGVELFVTKDQELIVNEIAPRPHNSGHYSIEACNLSQFDQHILAITNRELIEPRLVQPTLSVNILGQHLDHLRELVAKFPQAIVHIYDKGEGRTQRKMGHFTLSFESEDQIAETLKDPFLQDWFDQVG

SEQ ID NO: 1885 - DNA, 1179 bp, Alloiococcus otitidis; identical to SEQ ID NO: 1879
  CDS (13)..(1176)

SEQ ID NO: 1886 - protein, 388 aa, Alloiococcus otitidis
MKVVINLTNEPLLPGSTIGILGAGQLGKMLTQSAQKMGYHVHVFDTKEACTFPIAHKSVLGDFSDKDQVLNFAQEVDSLTYEFENINAEVLEDLSNQDYFIQGAKLLTISKNRLREKKWLNDIGTPTVPYRPINNLDELNQASADLGLPIVLKTVELGYDGKGQVLIKDESDLTDQADDIKSILDSGGVAEAFCDFDYEASVIVARNPQGEIECFPPTVNIHRAGILCASYSSSQLKEELFDDIKAVATTIAKESDLVGVCGVELFVTKDQELIVNEIAPRPHNSGHYSIEACNLSQFDQHILAITNRELIEPRLVQPTLSVNILGQHLDHLRELVAKFPQAIVHIYDKGEGRTQRKMGHFTLSFESEDQIAETLKDPFLQDWFDQVG

SEQ ID NO: 1887 - DNA, 717 bp, Alloiococcus otitidis
  CDS (28)..(714)
aagaagttaagaactaggaggattgacatggtattagaatacaagggaaaaaccaaggatgtttattccatcgatgacgacaaagttcgtttgatatttaaagatgacatgactggcaaagacggcaagttcgacccgggtgaaaaccaggcagatattgttgtggaaggggccggggcttctagcctggccttgaccacccacttcttccaattactcgatgaaaagaatatcccaagccactacatttcttctaacttggaagaagggtcaatggacgttcgacgggccaatatttttggcaagggcttggaaatcatctgccggttcaaggctacaggaagtttccttagacggtatgatgactacatcagtgaaggtgatgacctagatgcttacacagaagtctccttgaaaaatgacgaaaaaggtgaccccttcatctccaaggaaggcctgattcagctaggcattttaactggccaagaatatgaccagattatcaatttgaccaagcaaatttctagattggtaaaagaggaattggctcaaaaaggcttggaactttacgatattaaattggaatttggccgggatgctaaaagccaagaccttattctgatcgatgaaatatctgggggcaatatgcgggtctataaagacggccagtatttattccccttggacatcaaccaatatgtcctagaaggcaagtag

SEQ ID NO: 1888 - protein, 229 aa, Alloiococcus otitidis
MVLEYKGKTKDVYSIDDDKVRLIFKDDMTGKDGKFDPGENQADIVVEGAGASSLALTTHFFQLLDEKNIPSHYISSNLEEGSMDVRRANIFGKGLEIICRFKATGSFLRRYDDYISEGDDLDAYTEVSLKNDEKGDPFISKEGLIQLGILTGQEYDQIINLTKQISRLVKEELAQKGLELYDIKLEFGRDAKSQDLILIDEISGGNMRVYKDGQYLFPLDINQYVLEGK

SEQ ID NO: 1889 - DNA, 1392 bp, Alloiococcus otitidis
  CDS (64)..(1389)
aaccagctccaaaccaaattagcagacaatcttgtcttaaacattcccatcatcagtgcggggatggataccgtcaccgaatcggacatggccattgccatggcccgtcaaggtggtttaggggtcatccacaaaaatatgtccatcgctgaccaagcgcaagaagtcaaattggtcaaacggtcagaaaatggggtcatcaaaaaccccctcttcttgaccaaaaaagccttggttagccaggccaaagccatgatggaagaaaataatatatccggtatcccagtcgttaacgaacaagaggacaagaccctggtcggtatctttactacccgtgacctccgttatatatctgacgaaagccagccaatcgaagactacatgacccaagaaggggacttaatcaccgctccattaagcacaagcctaaaagaagcggaggagatcctctaccgtaaccggattgaaaaattgcctttagttgatgaaaaggcccaactggctggtcttattacctttaaggatattgaaaaaaccattgcctatcctgatgccgcgaaagatgacaatggtcgtttgcttgttgcagcagcagttggcatcggtgatgaaacatttgaccgggcccgtgccttaattgaagcggaagtagatgccttagtcattgacaccgcccacggccattcccggtctgtcttggaaaaaattgcagaaattcgccaaaccttcccggatgtcactatcattgctggcaatgtcgcaacttctgaaggggctaaagccctctatgatgctggtgttgacgtggtgaaagtcgggattggacctggctccatttgtaccacccgggtggttgcaggagtcggtgtaccgcaactgactgccatttacgactctgctaaggttgcccgtgaatatggcaagaccatcattgctgatggtgggatcaagcagtctggtgatattgccaaggccatcgcagcaggtggtaacgccgttatgatcgggtctatgttggcaggtaccgatgagtcccctggtcaatttgaaatctatcaaggccgtaagtacaaaacttaccgtggcatgggtagcctagcctccatgaaaaaagggtctggcgatcgctactttcaaaacaagaccaaagctgacaaacgggtgccagaaggaattgaaggtcgggtagcctaccggggtcaagtggctgatattatctaccaaatgattggtggactccgggctggtatgggctatgttggagcacccgacatccaacacctgattgaagaagcccaattcatcaagatgagtgccactggtttggtggaatcccacccccacgatgtcactattaccaaagaagcgcctaactactctagccattcttaa

SEQ ID NO: 1890 - protein, 442 aa, Alloiococcus otitidis
MDTVTESDMAIAMARQGGLGVIHKNMSIADQAQEVKLVKRSENGVIKNPLFLTKKALVSQAKAMMEENNISGIPVVNEQEDKTLVGIFTTRDLRYISDESQPIEDYMTQEGDLITAPLSTSLKEAEEILYRNRIEKLPLVDEKAQLAGLITFKDIEKTIAYPDAAKDDNGRLLVAAAVGIGDETFDRARALIEAEVDALVIDTAHGHSRSVLEKIAEIRQTFPDVTIIAGNVATSEGAKALYDAGVDVVKVGIGPGSICTTRVVAGVGVPQLTAIYDSAKVAREYGKTIIADGGIKQSGDIAKAIAAGGNAVMIGSMLAGTDESPGQFEIYQGRKYKTYRGMGSLASMKKGSGDRYFQNKTKADKRVPEGIEGRVAYRGQVADIIYQMIGGLRAGMGYVGAPDIQHLIEEAQFIKMSATGLVESHPHDVTITKEAPNYSSHS

SEQ ID NO: 1891 - DNA, 1344 bp, Alloiococcus otitidis
  CDS (337)..(1341)
gaaggaggaataagtatgaagtggcgacaagtcataacagtcggttttatgctatttgcaatgtattttggggctggtaacttgattttcccaccagttgtgggcttcaatgccggagatttcttctggccagccactattggatttgttttaacaggggttggcttgcctttaatcgggacagccacaggggccttgtcaagcggtggctaccgtgaggctcttaagaagatcaaccccgtcttctcagttgttctattagtcgttatttacttaaccattggcccattttttgccattcctagaacagctacaacagcttatgaattaggagtcttgcctttcttaagtgaaaactcaggcctggctctattgattacttcaattgtcttttttgcagccaccttatacttatctctccacccagacaacttagctaataacattgggaactacctgaccccaatattgctggctaccgttaccattgttgtagttcgtgtaatctttctcgctaccagttacgatgggtcttcatccattaataactttggcgacgggggagctttcgcttacgggtttaccgaaggctacctaaccatggatgctattgcagctattgcctttgccattctggtcattaacgccattaaggggatgggaatctctgacaaccacgaaattttcaaagggacggttaaggcctcccttattgctgccctcttgctcagcttggtttacgggtctcttgcttggattggtaacaatgttctgatttctagtgacctacccttggaccaaaacctaggtgctgccatgttgcaatatctctcctctgaagccttaggtagtgttggggttatcttgctcggcttggttgttttggttgcctgcctaacaacttcatctggtttgatttcagcttgtgcagaatactttaactctttgcttcctaacatttcctataatgcttttgccgtaatctttaccttgatttcctttgtcttggctaaccaaggtttggacaccatcattgaaacatctgttcctgtcctttccctcatctatccagtggccatgtcctcggtcttcttgcttttggttagcaactacctacctttgccaaaaattgcctttcatctcccattggtcttggtctttatttccagcctattgggtctactttaccggcaaaaatttgtttcttggtcctggatcactagtcaaccattcttcgaaagcgaattggaatggctacctatcctggttatcggctttttggttggctacctagtcggcaagttggttaaccaaccaaccgttagcttcagtcaagaacactaa

SEQ ID NO: 1892 - protein, 335 aa, Alloiococcus otitidis
MPFLSENSGLALLITSIVFFAATLYLSLHPDNLANNIGNYLTPILLATVTIVVVRVIFLATSYDGSSSINNFGDGGAFAYGFTEGYLTMDAIAAIAFAILVINAIKGMGISDNHEIFKGTVKASLIAALLLSLVYGSLAWIGNNVLISSDLPLDQNLGAAMLQYLSSEALGSVGVILLGLVVLVACLTTSSGLISACAEYFNSLLPNISYNAFAVIFTLISFVLANQGLDTIIETSVPVLSLIYPVAMSSVFLLLVSNYLPLPKIAFHLPLVLVFISSLLGLLYRQKFVSWSWITSQPFFESELEWLPILVIGFLVGYLVGKLVNQPTVSFSQEH

SEQ ID NO: 1893 - DNA, 1344 bp, Alloiococcus otitidis; identical to SEQ ID NO: 1891
  CDS (196)..(1341)

SEQ ID NO: 1894 - protein, 382 aa, Alloiococcus otitidis
MSSGGYREALKKINPVFSVVLLVVIYLTIGPFFAIPRTATTAYELGVLPFLSENSGLALLITSIVFFAATLYLSLHPDNLANNIGNYLTPILLATVTIVVVRVIFLATSYDGSSSINNFGDGGAFAYGFTEGYLTMDAIAAIAFAILVINAIKGMGISDNHEIFKGTVKASLIAALLLSLVYGSLAWIGNNVLISSDLPLDQNLGAAMLQYLSSEALGSVGVILLGLVVLVACLTTSSGLISACAEYFNSLLPNISYNAFAVIFTLISFVLANQGLDTIIETSVPVLSLIYPVAMSSVFLLLVSNYLPLPKIAFHLPLVLVFISSLLGLLYRQKFVSWSWITSQPFFESELEWLPILVIGFLVGYLVGKLVNQPTVSFSQEH

SEQ ID NO: 1895 - DNA, 1344 bp, Alloiococcus otitidis; identical to SEQ ID NO: 1891
  CDS (16)..(1341)

SEQ ID NO: 1896 - protein, 442 aa, Alloiococcus otitidis
MKWRQVITVGFMLFAMYFGAGNLIFPPVVGFNAGDFFWPATIGFVLTGVGLPLIGTATGALSSGGYREALKKINPVFSVVLLVVIYLTIGPFFAIPRTATTAYELGVLPFLSENSGLALLITSIVFFAATLYLSLHPDNLANNIGNYLTPILLATVTIVVVRVIFLATSYDGSSSINNFGDGGAFAYGFTEGYLTMDAIAAIAFAILVINAIKGMGISDNHEIFKGTVKASLIAALLLSLVYGSLAWIGNNVLISSDLPLDQNLGAAMLQYLSSEALGSVGVILLGLVVLVACLTTSSGLISACAEYFNSLLPNISYNAFAVIFTLISFVLANQGLDTIIETSVPVLSLIYPVAMSSVFLLLVSNYLPLPKIAFHLPLVLVFISSLLGLLYRQKFVSWSWITSQPFFESELEWLPILVIGFLVGYLVGKLVNQPTVSFSQEH

SEQ ID NO: 1897 - DNA, 405 bp, Alloiococcus otitidis
  CDS (25)..(402)
cctagtaaaacaataggaggatgtatgatgaaagaaatcaaaacaaaccaagctcctgcagccttgggcccctactcccaaggcatccaaacaggtaacctggtctacttgtccggtcaacttggcctggaccctcaaagtggcaacttaaaagaaggacttgaagcccaaacccaccaagcctttgccaatataaaggccctgttggaaagccagggcttaaccttaggcaatgtggtcaaggttttggtcttgttggctgacatcaaggactttggcccagttaacgacatttacgctgactatttccaagagacctaccctgcccggagcgcctttgcggttaaagacttacccaagggtggcttagtggaaattgaagttattgctgaagtgggcgaatag

SEQ ID NO: 1898 - protein, 126 aa, Alloiococcus otitidis
MMKEIKTNQAPAALGPYSQGIQTGNLVYLSGQLGLDPQSGNLKEGLEAQTHQAFANIKALLESQGLTLGNVVKVLVLLADIKDFGPVNDIYADYFQETYPARSAFAVKDLPKGGLVEIEVIAEVGE

SEQ ID NO: 1899 - DNA, 321 bp, Alloiococcus otitidis
  CDS (19)..(318)
aggagaggagtccaagaaatggaattaaaagtatcccctgcagctgttcaatggttcgaaagtgaactcggacccaaagaaggacaaggtgtgcaattttttggcaaggtctatggccaaacggaagtccatgaaggcttttcagtaggaataaaaattcaagacccagctaaacatgacattttagcccaggaccaggccaatggtcgcacctattttgcagctcgtgatgatgcctggttcttcaacccctatgacctagaagtcgacatagatccggacggtgcgggacccatctaccactttaagacaagtgaataa

SEQ ID NO: 1900 - protein, 100 aa, Alloiococcus otitidis
MELKVSPAAVQWFESELGPKEGQGVQFFGKVYGQTEVHEGFSVGIKIQDPAKHDILAQDQANGRTYFAARDDAWFFNPYDLEVDIDPDGAGPIYHFKTSE

SEQ ID NO: 1901 - DNA, 1251 bp, Alloiococcus otitidis
  CDS (190)..(1248)
agctttacccaaagcaaaaaagtcaagacccttgccttttacttttgcttcttcctattatattttataatattaattaacaatgatattaatgttagactagggagcataaatatgacaaatgaattatttacaccctttcaaatcaaccataaaactaaattgcaaaaccgactcgtcatggcccctatgaccattaattccagcctggaagatggaacagtatctgaccaggaaatcgactactaccaggctcggtcgagtcatttggggatggtgattacttctggtgcttacatttcaccagagggacaggccttcgccaacgggatatcagctgcccgagattccaacatcccaagtcttcaccgcctagcttcagccatcaaaaaagaaggagccaaggctattttgcaaatttaccatggcggacggatggcccggaccaactataacgaaaaccaagccatccttgccccttcccctgtcaaagccaaccgtccttgggcccaccagcctaaggctttaaaggaagaagatattgaagacctgatcactaactttggacaagctagtagacgggccatgcaagcgggttttgacggggtagaactccacggggccaatacctacctcctccagcaattcttttccccccactccaaccaaagaacagatgattgggggaatagtctggaaaatcgttttgagttttcgacccgggtcatcaaggaggtccaaaaaacagtccaagatatggataaggaggactttttaattggttaccggctgagtcctgaagaagtggaagcgccaggcattcgcattgaagacagcttgcgatttattgatcacctgatttctgctaaaattgattatgtccacttgtctgtccgccactaccagcaggcttccttctttgtcgaagataaccagattgaggacctgcctcagttaatctaccagcatatcgctggacgggtgcccttgattaatgtcggcaaagttagagatggccaggatgcccagctggccttaaaaagtggtgacttggttgcagtgggccgccagctcttgattgaccccaactggccccaaaaaattcaagatgaccaggctcatattgcccaggcaattcatttaaacgaccaagacaaattagccataccggaccccctctggcagatgattactgaccagtcaggatggattccggttgataaaggagaggagtccaagaaatggaattaa

SEQ ID NO: 1902 - protein, 353 aa, Alloiococcus otitidis
MTINSSLEDGTVSDQEIDYYQARSSHLGMVITSGAYISPEGQAFANGISAARDSNIPSLHRLASAIKKEGAKAILQIYHGGRMARTNYNENQAILAPSPVKANRPWAHQPKALKEEDIEDLITNFGQASRRAMQAGFDGVELHGANTYLLQQFFSPHSNQRTDDWGNSLENRFEFSTRVIKEVQKTVQDMDKEDFLIGYRLSPEEVEAPGIRIEDSLRFIDHLISAKIDYVHLSVRHYQQASFFVEDNQIEDLPQLIYQHIAGRVPLINVGKVRDGQDAQLALKSGDLVAVGRQLLIDPNWPQKIQDDQAHIAQAIHLNDQDKLAIPDPLWQMITDQSGWIPVDKGEESKKWN

SEQ ID NO: 1903 - DNA, 1251 bp, Alloiococcus otitidis; identical to SEQ ID NO: 1901
  CDS (115)..(1248)

SEQ ID NO: 1904 - protein, 378 aa, Alloiococcus otitidis
MTNELFTPFQINHKTKLQNRLVMAPMTINSSLEDGTVSDQEIDYYQARSSHLGMVITSGAYISPEGQAFANGISAARDSNIPSLHRLASAIKKEGAKAILQIYHGGRMARTNYNENQAILAPSPVKANRPWAHQPKALKEEDIEDLITNFGQASRRAMQAGFDGVELHGANTYLLQQFFSPHSNQRTDDWGNSLENRFEFSTRVIKEVQKTVQDMDKEDFLIGYRLSPEEVEAPGIRIEDSLRFIDHLISAKIDYVHLSVRHYQQASFFVEDNQIEDLPQLIYQHIAGRVPLINVGKVRDGQDAQLALKSGDLVAVGRQLLIDPNWPQKIQDDQAHIAQAIHLNDQDKLAIPDPLWQMITDQSGWIPVDKGEESKKWN

SEQ ID NO: 1905 - DNA, 543 bp, Alloiococcus otitidis
  CDS (1)..(540)
atgtctaagaaaagaggtttcgaacttgtaagtaaatatgagggtcaaggacttaacctgccccagcgtgccagcaaggcatcagccggctatgacttagaagcggcagttgatatcagcctcccttcgatctggcaggtcctcttagccaatggtggtttaaaccaggcagtatctttgggtcacttaccggaagaaaacgaagaatttttggcctcgaccctagtgccgaccggtgtcaaggcttttatgccaaatgatgagtacttgcttttagccaaccggtcttctaaccccatgaagcgccagttagccttgcccaatgggataggcgttattgatgcagactattacaacaacgccaataatgaaggggagatctttgtccaattgattaattacggtctaaaaccctaccaaatcaaaaaaggggaccggatagcccaggctatttttaccccctaccggaaagtagatgagaccggtatagatttaggtgaccggacaggcggctttgggtccagtggttacagtaagaactag

SEQ ID NO: 1906 - protein, 180 aa, Alloiococcus otitidis
MSKKRGFELVSKYEGQGLNLPQRASKASAGYDLEAAVDISLPSIWQVLLANGGLNQAVSLGHLPEENEEFLASTLVPTGVKAFMPNDEYLLLANRSSNPMKRQLALPNGIGVIDADYYNNANNEGEIFVQLINYGLKPYQIKKGDRIAQAIFTPYRKVDETGIDLGDRTGGFGSSGYSKN

SEQ ID NO: 1907 - DNA, 1392 bp, Alloiococcus otitidis
  CDS (427)..(1389)
taccttgaagttgggaggaataatgtggctaaaaaacaaaaaaccatcttcgtttgccaggaatgcggggctgaatctcccaagtatttggggcggtgcccgtcttgtggcaagtggaacactctagtggaagagcgagttcaagaccgggctgacacgcgaaaccggcttaattttagtggcaaacgggccaaagcagctcccattaacgaagtcgaaattgaaaaagaggaccggatccaagtcccctttgccgaatttaaccgggtcttagggggtggagtggtcccaggctccctggtcttgatcgggggcgatcccggaattggcaagtctaccttgctactacagatttctgcctttttgaataatatcgggggcttggtcctttatgtgacgggtgaggagagtgccagccagattaagatgcgggctgaacgtttagacttggtggagaataatttctacctttatgctgaaacagacttgtcagccatagaagaaacagtcgaggaaatccgacctaacttcttaattatcgattccatccagaccatgcaccacccggatatcgacagtgcagctggttcagtttcccaagttcgggaatccactgctagcttgatgaagattgccaagtccaatgacattgcgacttttatcgtgggacatgtcaccaaggaaggcaatattgcagggccccggatgctagagcacatggttgatacggttctttacttcgaaggagaccagcaccagactttccggattttgcgggcggtcaagaaccgctttgggtcgaccaatgaaattgccatttttgaaatgaacgaaaaaggcctcaaggaagtccaaaatccttccaaacttttcttggaagaacgcttggcaggggctaatgggtcagcagtcgtggctgccatggaagggacccgtccgatcttggtggagatccagtccttgatcaccccaaccgcctttggtaatgccaagcggactgccagtggtttagattactcccgggtctccctcctgatggcggttttggagaagcgggctggcttactcctacaaaattacgatgcttatctcaaggcagctgggggagtcaagttagatgagccggcgattgacctttccattgccgtgagcattgcttccagctacaaggaagaagaaacggacccaaccgactgctttatcggagaaattggactaaccggggaattgcgccgggtttctaaaattgaccaaagagtcactgaagcagccaaacttggcttcaaacgagtttttatccccaaaaataaccaagagggttggacttatcccaaaggaatccaagtcatcccctgtcggactattggccaggtcctgcaagttattttctaa

SEQ ID NO: 1908 - protein, 321 aa, Alloiococcus otitidis
MRAERLDLVENNFYLYAETDLSAIEETVEEIRPNFLIIDSIQTMHHPDIDSAAGSVSQVRESTASLMKIAKSNDIATFIVGHVTKEGNIAGPRMLEHMVDTVLYFEGDQHQTFRILRAVKNRFGSTNEIAIFEMNEKGLKEVQNPSKLFLEERLAGANGSAVVAAMEGTRPILVEIQSLITPTAFGNAKRTASGLDYSRVSLLMAVLEKRAGLLLQNYDAYLKAAGGVKLDEPAIDLSIAVSIASSYKEEETDPTDCFIGEIGLTGELRRVSKIDQRVTEAAKLGFKRVFIPKNNQEGWTYPKGIQVIPCRTIGQVLQVIF

SEQ ID NO: 1909 - DNA, 1392 bp, Alloiococcus otitidis; identical to SEQ ID NO: 1907
  CDS (127)..(1389)

SEQ ID NO: 1910 - protein, 421 aa, Alloiococcus otitidis
MEERVQDRADTRNRLNFSGKRAKAAPINEVEIEKEDRIQVPFAEFNRVLGGGVVPGSLVLIGGDPGIGKSTLLLQISAFLNNIGGLVLYVTGEESASQIKMRAERLDLVENNFYLYAETDLSAIEETVEEIRPNFLIIDSIQTMHHPDIDSAAGSVSQVRESTASLMKIAKSNDIATFIVGHVTKEGNIAGPRMLEHMVDTVLYFEGDQHQTFRILRAVKNRFGSTNEIAIFEMNEKGLKEVQNPSKLFLEERLAGANGSAVVAAMEGTRPILVEIQSLITPTAFGNAKRTASGLDYSRVSLLMAVLEKRAGLLLQNYDAYLKAAGGVKLDEPAIDLSIAVSIASSYKEEETDPTDCFIGEIGLTGELRRVSKIDQRVTEAAKLGFKRVFIPKNNQEGWTYPKGIQVIPCRTIGQVLQVIF

SEQ ID NO: 1911 - DNA, 1392 bp, Alloiococcus otitidis; identical to SEQ ID NO: 1907
  CDS (88)..(1389)

SEQ ID NO: 1912 - protein, 434 aa, Alloiococcus otitidis
MGRCPSCGKWNTLVEERVQDRADTRNRLNFSGKRAKAAPINEVEIEKEDRIQVPFAEFNRVLGGGVVPGSLVLIGGDPGIGKSTLLLQISAFLNNIGGLVLYVTGEESASQIKMRAERLDLVENNFYLYAETDLSAIEETVEEIRPNFLIIDSIQTMHHPDIDSAAGSVSQVRESTASLMKIAKSNDIATFIVGHVTKEGNIAGPRMLEHMVDTVLYFEGDQHQTFRILRAVKNRFGSTNEIAIFEMNEKGLKEVQNPSKLFLEERLAGANGSAVVAAMEGTRPILVEIQSLITPTAFGNAKRTASGLDYSRVSLLMAVLEKRAGLLLQNYDAYLKAAGGVKLDEPAIDLSIAVSIASSYKEEETDPTDCFIGEIGLTGELRRVSKIDQRVTEAAKLGFKRVFIPKNNQEGWTYPKGIQVIPCRTIGQVLQVIF

SEQ ID NO: 1913 - DNA, 1392 bp, Alloiococcus otitidis; identical to SEQ ID NO: 1907
  CDS (25)..(1389)

SEQ ID NO: 1914 - protein, 455 aa, Alloiococcus otitidis
MAKKQKTIFVCQECGAESPKYLGRCPSCGKWNTLVEERVQDRADTRNRLNFSGKRAKAAPINEVEIEKEDRIQVPFAEFNRVLGGGVVPGSLVLIGGDPGIGKSTLLLQISAFLNNIGGLVLYVTGEESASQIKMRAERLDLVENNFYLYAETDLSAIEETVEEIRPNFLIIDSIQTMHHPDIDSAAGSVSQVRESTASLMKIAKSNDIATFIVGHVTKEGNIAGPRMLEHMVDTVLYFEGDQHQTFRILRAVKNRFGSTNEIAIFEMNEKGLKEVQNPSKLFLEERLAGANGSAVVAAMEGTRPILVEIQSLITPTAFGNAKRTASGLDYSRVSLLMAVLEKRAGLLLQNYDAYLKAAGGVKLDEPAIDLSIAVSIASSYKEEETDPTDCFIGEIGLTGELRRVSKIDQRVTEAAKLGFKRVFIPKNNQEGWTYPKGIQVIPCRTIGQVLQVIF

SEQ ID NO: 1915 - DNA, 246 bp, Alloiococcus otitidis
  CDS (4)..(243)
ccaatgtcttctaagacattgccaatcacgttggttgcagcaatcgtttcttcccagtttaggacagcgatctcaatctggtctccatccaccaactggtcttctgtttcttcttcaccgcaggccgcaagaagaccggcagccagggcaatagatgcaaaacgtgtcaactgcttgttcaatttaatcatagttttcattctccccatgttcttgagcggacggttaacacaagctttattataa

SEQ ID NO: 1916 - protein, 80 aa, Alloiococcus otitidis
MSSKTLPITLVAAIVSSQFRTAISIWSPSTNWSSVSSSPQAARRPAARAIDAKRVNCLFNLIIVFILPMFLSGRLTQALL

SEQ ID NO: 1917 - DNA, 990 bp, Alloiococcus otitidis
  CDS (79)..(987)
attgtttttatgacctcttttctttataataaagcttgtgttaaccgtccgctcaagaacatggggagaatgaaaactatgattaaattgaacaagcagttgacacgttttgcatctattgccctggctgccggtcttcttgcggcctgcggtgaagaagaaacagaagaccagttggtggatggagaccagattgagatcgctgtcctaaactgggaagaaacgattgctgcaaccaacgtgattggcaatgtcttagaagacattggctatgatgtgacgacgacaacagttgatgtggctgtcctgtggcaagcccttgctgatggtgaaaccgatgcttcagtttcagcttggttacctattacccacggtgccttagaggaagaatatggggaccagattgaaaacttaggcgctcacattgaaggagctaaggttggcttagccgttccaacatacatggaagggcttgaatccatcgaagacttgacagatgaagcgggtcaagaagtgaccggtattgaacccggatctggtatcatggattctgctgaaaatgccatggagacctatgacaatttagcagactggaacctacaaaatgcttcaactggagccatgctgtcagaattacgaaccagcattgacaatgaagaagaaattgtcattacaggctggaaccctcactggatgttccaagaatatgacttgaagtatttagatgacccagaaggtgcctttggtggagaagaatccatcattacgcaagtccgtcaaggcttccaagatgaccaccccattgcttactctgtcttagataactttgaatgggaaatggatgacatcgaaagcgtggttcaagaaatggctgaaacggatgacccagaaggtgcagctgaaagctggattgaagcgaaccaggaccggatagatgaatggcttgaagaggctagacaactagcccaagaacaatcggaagaccagtag

SEQ ID NO: 1918 - protein, 303 aa, Alloiococcus otitidis
MIKLNKQLTRFASIALAAGLLAACGEEETEDQLVDGDQIEIAVLNWEETIAATNVIGNVLEDIGYDVTTTTVDVAVLWQALADGETDASVSAWLPITHGALEEEYGDQIENLGAHIEGAKVGLAVPTYMEGLESIEDLTDEAGQEVTGIEPGSGIMDSAENAMETYDNLADWNLQNASTGAMLSELRTSIDNEEEIVITGWNPHWMFQEYDLKYLDDPEGAFGGEESIITQVRQGFQDDHPIAYSVLDNFEWEMDDIESVVQEMAETDDPEGAAESWIEANQDRIDEWLEEARQLAQEQSEDQ

SEQ ID NO: 1919 - DNA, 990 bp, Alloiococcus otitidis; identical to SEQ ID NO: 1917
  CDS (10)..(987)

SEQ ID NO: 1920 - protein, 326 aa, Alloiococcus otitidis
MTSFLYNKACVNRPLKNMGRMKTMIKLNKQLTRFASIALAAGLLAACGEEETEDQLVDGDQIEIAVLNWEETIAATNVIGNVLEDIGYDVTTTTVDVAVLWQALADGETDASVSAWLPITHGALEEEYGDQIENLGAHIEGAKVGLAVPTYMEGLESIEDLTDEAGQEVTGIEPGSGIMDSAENAMETYDNLADWNLQNASTGAMLSELRTSIDNEEEIVITGWNPHWMFQEYDLKYLDDPEGAFGGEESIITQVRQGFQDDHPIAYSVLDNFEWEMDDIESVVQEMAETDDPEGAAESWIEANQDRIDEWLEEARQLAQEQSEDQ

SEQ ID NO: 1921 - DNA, 1230 bp, Alloiococcus otitidis
  CDS (433)..(1227)
gggctgactttagtctttactctagcatggaggagtctcaggacaaatgatgatccattagcaatacttaacattcagaaaaaggagggatgtcctatgaggaaactcatcatcctactatttattttcgtggggggtagtataggttttaacaactttaccgacctcctggatagtcttccacccatgtctatacctacaattatttacaatccttggttgggcatggtcttaggggctggcatcttttttgtcgtttcactctttatagtggaccccatcttaaagggcttaaaacgactgacccggtttctaaccgatttaagtttgtcttacttgctttgtggaagtttggggcttgtttttggtcttattatttcatggttaattaatttttccctccaaactttcaatatcccccttttaaatgaagtggtttcggctgtgattaccttcaccttggcttatgtcggtttttatatcgggaccagttaccatcaagaagtggctgactttctaaagaaccagcaagaccgaaggaaggaccaggaacctgaccaggcaggagagacggggcattttttgaaatacaaggtcttagacactagtgtgattatcgatggccgtatcttaggtattatacggtcaggttttttggaaggagtctttgtcatctccaaacatgtcctccaggaacttcagtatattgctgattcatcggacaatttaaaaagaagtcacggtaggaggggcttggatattttaaacgagctccaagatgacgaccaaatccaggtagaaatggatgaccgggactttgaagacgaagctgaagttgacctaaaattagtccggctagcccaagacctgaaaggagccgttattaccaatgactataacttaaacaaggtggcccagttccagcaggttcctgttttgaatatcaatgaattagccaaccaagtcaaacctgccattatcccaggtgaggagatgcgggtcaccattgtcaaaaagggtaccgagagacagcaaggcgtggcatatttggaaaatggaaccatggtagtagtggaggatggcaagcactatatcaaccagtccctagatgtagtggtaacctcatcactgcagaccaatgcgggccggatgatttttgccgatattgccgaccctaccaatgttggagacccagaatttggccaggaccaaagcacggcagaaggttag

SEQ ID NO: 1922 - protein, 265 aa, Alloiococcus otitidis
MVSAVITFTLAYVGFYIGTSYHQEVADFLKNQQDRRKDQEPDQAGETGHFLKYKVLDTSVIIDGRILGIIRSGFLEGVFVISKHVLQELQYIADSSDNLKRSHGRRGLDILNELQDDDQIQVEMDDRDFEDEAEVDLKLVRLAQDLKGAVITNDYNLNKVAQFQQVPVLNINELANQVKPAIIPGEEMRVTIVKKGTERQQGVAYLENGTMVVVEDGKHYINQSLDVVVTSSLQTNAGRMIFADIADPTNVGDPEFGQDQSTAEG

SEQ ID NO: 1923 - DNA, 1230 bp, Alloiococcus otitidis; identical to SEQ ID NO: 1921
  CDS (97)..(1227)

SEQ ID NO: 1924 - protein, 377 aa, Alloiococcus otitidis
MRKLIILLFIFVGGSIGFNNFTDLLDSLPPMSIPTIIYNPWLGMVLGAGIFFVVSLFIVDPILKGLKRLTRFLTDLSLSYLLCGSLGLVFGLIISWLINFSLQTFNIPLLNEVVSAVITFTLAYVGFYIGTSYHQEVADFLKNQQDRRKDQEPDQAGETGHFLKYKVLDTSVIIDGRILGIIRSGFLEGVFVISKHVLQELQYIADSSDNLKRSHGRRGLDILNELQDDDQIQVEMDDRDFEDEAEVDLKLVRLAQDLKGAVITNDYNLNKVAQFQQVPVLNINELANQVKPAIIPGEEMRVTIVKKGTERQQGVAYLENGTMVVVEDGKHYINQSLDVVVTSSLQTNAGRMIFADIADPTNVGDPEFGQDQSTAEG

SEQ ID NO: 1925 - DNA, 1482 bp, Alloiococcus otitidis
  CDS (16)..(1479)
aaaggagataaagtcatgtcagataagatccgcgtccgttatgccccaagccctactggacacttgcatataggcaatgcccggacagccctgtttaactatttatttgcccgccacaacaatggtgattttattattcggacggaagataccgaccagaaacgtcatgttgaaaccggtgaagagagccaatttacttatttaaaatggttgggcatcgactgggatgaagggtcagatatcggaggcgattacggtccataccgtcaatctgaacgatttgacctatataaccaatacattaatgacttgcttgaccgcgacttagcctacaagtgctatgcaacagccgaagagttggaagaaatgagagaaaaacagcgggcccaggggattgcgccccactatgatggccgccatgcccacttgaccaaagaagaacaagatgcctttgaagcggagggaagagatccagttatccgaatccgggtgccagaagaccaggtctaccgctttgacgatatggtgaagggggaagtcagctttgatgctaaagacattggcggggactttgttatccgtaaggtggacgggtctccaacctacaactttgctgtggcagtggatgaccacgaaatggccatcagccatgtcttaagaggggacgaccatgtttcaaatactcctaaacaattggtggtttacgacgcttttggatgggaagccccagtctttggccatatgaccctgattattaatgccgaaaccggcaaaaaattaagcaagcgggacgaaagtatcctgcaatttatcgaacaatacaaggacttaggttacctccctcaagctttgtttaacttcattgccctccttggttggtcacctaagggcgaagaggaaatcttttctaaagaagaatttatcggtatgtttgacacagaccggttgaatacctctccggcagcctttgatgagaagaaattggactggatttccaaccaatatattaaaaaattggatgatgaggccgttttggacctagccaagcctcatttagaagaagcaggcctttacgatcctgacaaaaaagattggtttattaagctagcaggtctctacaaggaacaaatgagctatggcaaggaattgcttgacctagcctccctctttttcggacaagagattagttatggtcctgaagaaaaggaagtcttggacggggaaacagtcggccaggtcctcaaatcctttaaggaccatttaagtgaagtggacccctttgaaaaagaccctatcttcaaagccatcaaggccgtgcaaaaagaaaccggggtcaagggtcgcaacctctttatgccgattcgggtggcaaccactggtgagcaacacggcccagagcttcctttagctatcgagttgattggctatgaccaaacccaagcccatcttgaccaggctctttcctatgtggaaggccagtaa

SEQ ID NO: 1926 - protein, 488 aa, Alloiococcus otitidis
MSDKIRVRYAPSPTGHLHIGNARTALFNYLFARHNNGDFIIRTEDTDQKRHVETGEESQFTYLKWLGIDWDEGSDIGGDYGPYRQSERFDLYNQYINDLLDRDLAYKCYATAEELEEMREKQRAQGIAPHYDGRHAHLTKEEQDAFEAEGRDPVIRIRVPEDQVYRFDDMVKGEVSFDAKDIGGDFVIRKVDGSPTYNFAVAVDDHEMAISHVLRGDDHVSNTPKQLVVYDAFGWEAPVFGHMTLIINAETGKKLSKRDESILQFIEQYKDLGYLPQALFNFIALLGWSPKGEEEIFSKEEFIGMFDTDRLNTSPAAFDEKKLDWISNQYIKKLDDEAVLDLAKPHLEEAGLYDPDKKDWFIKLAGLYKEQMSYGKELLDLASLFFGQEISYGPEEKEVLDGETVGQVLKSFKDHLSEVDPFEKDPIFKAIKAVQKETGVKGRNLFMPIRVATTGEQHGPELPLAIELIGYDQTQAHLDQALSYVEGQ

SEQ ID NO: 1927 - DNA, 300 bp, Alloiococcus otitidis
  CDS (28)..(297)
accaccataggcgagccggctttggcgatggctgccttctcaccggctatttctggcaggctatcccctaaaaaagcggtatggtccatgccaatcttggtaatggcggtgacggcaggacggcttatcacattggtagcatctaaccgtcctcctaatccgacctctacaacggctatatcacaagcctggtcctggaaggtcaaaaaggccagggcagtaaaaagttcaaattcagtcaggcaaagggatgtgccttctaaggcctggcttagggtcttgactgccttgagcaactga

SEQ ID NO: 1928 - protein, 90 aa, Alloiococcus otitidis
MAAFSPAISGRLSPKKAVWSMPILVMAVTAGRLITLVASNRPPNPTSTTAISQAWSWKVKKARAVKSSNSVRQRDVPSKAWLRVLTALSN

SEQ ID NO: 1929 - DNA, 300 bp, Alloiococcus otitidis; identical to SEQ ID NO: 1927
  CDS (22)..(297)

SEQ ID NO: 1930 - protein, 92 aa, Alloiococcus otitidis
MAMAAFSPAISGRLSPKKAVWSMPILVMAVTAGRLITLVASNRPPNPTSTTAISQAWSWKVKKARAVKSSNSVRQRDVPSKAWLRVLTALSN

SEQ ID NO: 1931 - DNA, 1290 bp, Alloiococcus otitidis
  CDS (1)..(1287)
atgcagtatgcagaacttcttgacctcctgcccctacaagaacaagggaagatggatttggggctagcaaccatgacccaggtgatggacttattgggcaagccccaagaccaggtccccatggttcatatcgctggcaccaatggcaaggggtcggccgcagcctttacagagcgaatactcagggaggctggctacaaggtcggcttgtatatttccccttccctagtggaatttaatgaacggatccaaatcaatggccaagccacaagtgatgatcagttgctcaaggcagtcaagaccctaagccaggccttagaaggcacatccctttgcctgactgaatttgaactttttactgccctggcctttttgaccttccaggaccaggcttgtgatatagccgttgtagaggtcggattaggaggacggttagatgctaccaatgtgataagccgtcctgccgtcaccgccattaccaagattggcatggaccataccgcttttttaggggatagcctgccagaaatagccggtgagaaggcagccatcgccaaagccggctcgcctatggtggtctatccccaggggccagaagtgactcgggtgatccaaaatcaggcggaccgggtaggagcctctctgaccctaatttctcaatccgacctgacttataacctgacttcggacctcttgcaagactttgaatacaagcaggttccctaccgcatttcacttttagaagattatcaaatttacaacgccctggtagcactcgaaatctcttttgccttacaggatgctggctggcagattagccctaaagccattaaacaaggtttggttgagacccgctggcccggccgttttgaacttatcgcctctcatccgaccgtgatcgttgatgggtctcataatgaagacggcctgcaggctctcttggctaacctagaccgctactttccagaacaaaaaaggattgggatcgtaggcatgttggccgacaaggatgttgatgccgccctagctcctttaaccaaaagctttgaccggctttatacggtgacacccgattcgccgcgggggatggcagcccctcaaatgaaagaaaaactgaccgaaatggtgtcgccgtctactcgggtcatagcttgtgaaagttataaccaggccttagacctggcaggtcaagtagccggcggagatgacctaattgtcgtttttggaagtttttatattgttggtaagtttagacagctgattttagcaagaagaaatggggaagtttaa

SEQ ID NO: 1932 - protein, 429 aa, Alloiococcus otitidis
MQYAELLDLLPLQEQGKMDLGLATMTQVMDLLGKPQDQVPMVHIAGTNGKGSAAAFTERILREAGYKVGLYISPSLVEFNERIQINGQATSDDQLLKAVKTLSQALEGTSLCLTEFELFTALAFLTFQDQACDIAVVEVGLGGRLDATNVISRPAVTAITKIGMDHTAFLGDSLPEIAGEKAAIAKAGSPMVVYPQGPEVTRVIQNQADRVGASLTLISQSDLTYNLTSDLLQDFEYKQVPYRISLLEDYQIYNALVALEISFALQDAGWQISPKAIKQGLVETRWPGRFELIASHPTVIVDGSHNEDGLQALLANLDRYFPEQKRIGIVGMLADKDVDAALAPLTKSFDRLYTVTPDSPRGMAAPQMKEKLTEMVSPSTRVIACESYNQALDLAGQVAGGDDLIVVFGSFYIVGKFRQLILARRNGEV

SEQ ID NO: 1933 - DNA, 558 bp, Alloiococcus otitidis
  CDS (109)..(555)
ttggtagactaccagagaattgaaaaagcagtagaggaaatattaagagcagtaggggaagatcctggacgtgaaggactacttgagacacccaagcgggtagctaaaatgtatgctgaacgttttgcaggcttggaaaaagatccagcagtccatactcaaaaatatttccacgaagacaatgaacttgttttggtcaaagacatagaatttgactccacttgtgagcaccacctcctacctatcattggcaaggcccatgtggcttataaacccaaagatggtcgcgtgattggtctctccaagcttgctcggattctagaagatgtgaccaagcgcccccaacttcaagaacggattaccaaccaagttgctgatgtgattatggacaacctagagcctgaaggtgtttttgttgtggtggaaggtgaacatatgtgtatgtccatccgtggcatcaaaaagcgtggctccatcactgtaaccaaggctgaacgaggagttttccggcaagacaaggaactcaaaagagaagtcttggacatgattaaggaataa

SEQ ID NO: 1934 - protein, 149 aa, Alloiococcus otitidis
MYAERFAGLEKDPAVHTQKYFHEDNELVLVKDIEFDSTCEHHLLPIIGKAHVAYKPKDGRVIGLSKLARILEDVTKRPQLQERITNQVADVIMDNLEPEGVFVVVEGEHMCMSIRGIKKRGSITVTKAERGVFRQDKELKREVLDMIKE

SEQ ID NO: 1935 - DNA, 558 bp, Alloiococcus otitidis; identical to SEQ ID NO: 1933
  CDS (1)..(555)

SEQ ID NO: 1936 - protein, 185 aa, Alloiococcus otitidis
MVDYQRIEKAVEEILRAVGEDPGREGLLETPKRVAKMYAERFAGLEKDPAVHTQKYFHEDNELVLVKDIEFDSTCEHHLLPIIGKAHVAYKPKDGRVIGLSKLARILEDVTKRPQLQERITNQVADVIMDNLEPEGVFVVVEGEHMCMSIRGIKKRGSITVTKAERGVFRQDKELKREVLDMIKE

SEQ ID NO: 1937 - DNA, 387 bp, Alloiococcus otitidis
  CDS (16)..(384)
agaaagaggaataagatggataaaagagataagatacgcttgcaagggatgacttttcacggccaccacggtttgatggaggccgaaaccaagttgggtcagatttttaaagtcgaccttgtcttagtaactgacctcaagttagcgggtcaaacagacaagatggggcacagtatccactacggggaagtttatgacctggtcaagtccattgtggaaggtaccccctttaagcttttggagtccttggcggaaaccctagcccaagaagttctcaagacttttgaccaggttgaggaggtcttggtccgggtcaacaaaccccaggccccgattcctggtgtctttgacaatgtagcggtggaaatcacccgggcccgtcactag

SEQ ID NO: 1938 - protein, 123 aa, Alloiococcus otitidis
MDKRDKIRLQGMTFHGHHGLMEAETKLGQIFKVDLVLVTDLKLAGQTDKMGHSIHYGEVYDLVKSIVEGTPFKLLESLAETLAQEVLKTFDQVEEVLVRVNKPQAPIPGVFDNVAVEITRARH

SEQ ID NO: 1939 - DNA, 552 bp, Alloiococcus otitidis
  CDS (55)..(549)
ataggtaaggaggaatatagagtgaagggtgttatgataggactcggttctaatatggggactaagttggcttacttaaaccgggctttggccaaaataaatagcctagaccaggtagcagtcaagcaagtttcaaaggtttaccagactgaaccggtgggctacaaggaccaggacgatttttacaatatggttgctggccttgaaattgaaccaggcaagacccccttggacctcttagaagacttgctggcgattgaggcagacctggacaggaagcggaccattaaaaatggcccccgaaccattgacttggatgtcttgctggtggagggtcaagaaattgaccatcccaagctccaagttccccacccaaggctccaggaccgggcctttgtcttggtccccttggctgagttggaccccaactacctggttcctggcatagataagacagttgcggacttgttggcttctttaaaccaaaccgacctagcaggggtggaggctttgggtcagttgacgaacctattagaagaccgtgaggcttga

SEQ ID NO: 1940 - protein, 165 aa, Alloiococcus otitidis
MGTKLAYLNRALAKINSLDQVAVKQVSKVYQTEPVGYKDQDDFYNMVAGLEIEPGKTPLDLLEDLLAIEADLDRKRTIKNGPRTIDLDVLLVEGQEIDHPKLQVPHPRLQDRAFVLVPLAELDPNYLVPGIDKTVADLLASLNQTDLAGVEALGQLTNLLEDREA

SEQ ID NO: 1941 - DNA, 552 bp, Alloiococcus otitidis; identical to SEQ ID NO: 1939
  CDS (34)..(549)

SEQ ID NO: 1942 - protein, 172 aa, Alloiococcus otitidis
MIGLGSNMGTKLAYLNRALAKINSLDQVAVKQVSKVYQTEPVGYKDQDDFYNMVAGLEIEPGKTPLDLLEDLLAIEADLDRKRTIKNGPRTIDLDVLLVEGQEIDHPKLQVPHPRLQDRAFVLVPLAELDPNYLVPGIDKTVADLLASLNQTDLAGVEALGQLTNLLEDREA

SEQ ID NO: 1943 - DNA, 552 bp, Alloiococcus otitidis; identical to SEQ ID NO: 1939
  CDS (22)..(549)

SEQ ID NO: 1944 - protein, 176 aa, Alloiococcus otitidis
MKGVMIGLGSNMGTKLAYLNRALAKINSLDQVAVKQVSKVYQTEPVGYKDQDDFYNMVAGLEIEPGKTPLDLLEDLLAIEADLDRKRTIKNGPRTIDLDVLLVEGQEIDHPKLQVPHPRLQDRAFVLVPLAELDPNYLVPGIDKTVADLLASLNQTDLAGVEALGQLTNLLEDREA

SEQ ID NO: 1945 - DNA, 999 bp, Alloiococcus otitidis
  CDS (28)..(996)
aaagccaagcatgggaggatagaaacaatgaccaaagaagagattgtagtcttagacggatcttatgccaaccctggggatatgtcttgggattttttagaggcatatgggaaggtgactatctatcaggatactccccatgaccaggttcaagtgattaaggaccgggtgaaagaggctagtgtggttatcaccaacaaggttcccctgggggaagaaatattaggagcttgcccacagttaaaatatattatcgtctccgcaacgggctacaacaatgtcgacctacccgctgccaagaacttaggtatttcagtctccaacatccccgcttacagtagtgcttcggttgcccagcactgcttggcccttttgctctatttaactaaccaggttgaccactacagccaggcagtcggccagggtcgctggcaggaggaaggctggactttttatgaccaggactaccctatccaggagctagacggtaagtgcttgggcgtggtgggctttgggtcgattggccaggcctttgcccgaatttgccgggctttaggcatgaatattttagcctacaaccggagtcaaagccccagtggccaggaacttgctcgctatgtttccttggaagacctacttgccaagtctgatgtgatcagcctccacctccccttgacggatcagacctggcatattatcgacaaccaagctctttcacaagtgaaggatggggtcattttactgaatactgccaggggtcccttgcttgacccacaagccttggctgatgccctaaaagatggccgggtcaaagcagctgggattgacgtcttggaccaagaacccatgccccgtgaccaccctttagagggtttggctaattgtatcctgaccccacacattgcctgggctagccaggaaagtcgccagcgacttttagagaagatcgaccacaatttagcggcctaccaagcgggtcaacccatcaacttggtttaa

SEQ ID NO: 1946 - protein, 323 aa, Alloiococcus otitidis
MTKEEIVVLDGSYANPGDMSWDFLEAYGKVTIYQDTPHDQVQVIKDRVKEASVVITNKVPLGEEILGACPQLKYIIVSATGYNNVDLPAAKNLGISVSNIPAYSSASVAQHCLALLLYLTNQVDHYSQAVGQGRWQEEGWTFYDQDYPIQELDGKCLGVVGFGSIGQAFARICRALGMNILAYNRSQSPSGQELARYVSLEDLLAKSDVISLHLPLTDQTWHIIDNQALSQVKDGVILLNTARGPLLDPQALADALKDGRVKAAGIDVLDQEPMPRDHPLEGLANCILTPHIAWASQESRQRLLEKIDHNLAAYQAGQPINLV

SEQ ID NO: 1947 - DNA, 981 bp, Alloiococcus otitidis
  CDS (25)..(978)
gttatagaaggaaaggtgacgaagatgaaagtatccctccttgaacccctcaatgtttcccagaacctaattgaccgcctagcccagcccattaaggacctagggcatgactttgtctattattcagaccaaaccagtgaccccgaggaattggcagaccggacgggggattctgatatcgttatgattgccaacaccccctaccctaaacaagcctttagtcaggcagacaagttgcaactgatcaatgtggcctttaccggtattgaccatgtagaccaggaggccgcccgggggaaagggattcagattgccaatgcagccggttattcagaccaatctgtcgcagaacacgttattggtctcatcctggacctctaccgccagatttcatggggcaaccaagccatccgccaaagtaactttcctggccccagccagggtagggttctggcgggcaagaccgtgggaatcatagggactggcaatattggcctgaaaactgctagcttacttaaggccttcggtgttcaatttttagcctatagtcggactgaaaaagaccaagccaaggccatgggagtaaaatatgtttccttggaaagattgctggaagaaagtgatattgttaccgtccacctcccccataatgaccaaacccaaggcctcctatctaaggacaaactggccttgatgaaagactctgctattttgatcaactgtgcccgggggcccattgtggataacgatggcctagcagaccttctcaaccaaggccaactagctggtgctgggattgacgtttttgacacggagccccctttgccagaagactataaactcctccaggcccaaaacaccatcttaaccccacatgtggcctacttaactgaccaggccatggttaaccgggctaagatcgtttttgataccacattggcctatttaaagggggaggaaaagaatatccagcttggctag

SEQ ID NO: 1948 - protein, 318 aa, Alloiococcus otitidis
MKVSLLEPLNVSQNLIDRLAQPIKDLGHDFVYYSDQTSDPEELADRTGDSDIVMIANTPYPKQAFSQADKLQLINVAFTGIDHVDQEAARGKGIQIANAAGYSDQSVAEHVIGLILDLYRQISWGNQAIRQSNFPGPSQGRVLAGKTVGIIGTGNIGLKTASLLKAFGVQFLAYSRTEKDQAKAMGVKYVSLERLLEESDIVTVHLPHNDQTQGLLSKDKLALMKDSAILINCARGPIVDNDGLADLLNQGQLAGAGIDVFDTEPPLPEDYKLLQAQNTILTPHVAYLTDQAMVNRAKIVFDTTLAYLKGEEKNIQLG

SEQ ID NO: 1949 - DNA, 981 bp, Alloiococcus otitidis; identical to SEQ ID NO: 1947
  CDS (16)..(978)

SEQ ID NO: 1950 - protein, 321 aa, Alloiococcus otitidis
MTKMKVSLLEPLNVSQNLIDRLAQPIKDLGHDFVYYSDQTSDPEELADRTGDSDIVMIANTPYPKQAFSQADKLQLINVAFTGIDHVDQEAARGKGIQIANAAGYSDQSVAEHVIGLILDLYRQISWGNQAIRQSNFPGPSQGRVLAGKTVGIIGTGNIGLKTASLLKAFGVQFLAYSRTEKDQAKAMGVKYVSLERLLEESDIVTVHLPHNDQTQGLLSKDKLALMKDSAILINCARGPIVDNDGLADLLNQGQLAGAGIDVFDTEPPLPEDYKLLQAQNTILTPHVAYLTDQAMVNRAKIVFDTTLAYLKGEEKNIQLG

SEQ ID NO: 1951 - DNA, 1539 bp, Alloiococcus otitidis
  CDS (112)..(1536)
taccacattggcctatttaaagggggaggaaaagaatatccagcttggctaggggacttaaaccattactgctataatggatttgaatttaaaagattggaggcttgttcaatgattaaagtctataatactttgaccaataaaaaagaaccctttgaaaccattgaagaaggcaaggtgaccatgtatgtctgtgggccgactgtttacaattatattcatattgggaatgcccggtcagctgtagcctttgataccatccgcaaatacttagaataccggggctaccaggtcaagtatgtctcaaactttaccgacgtggatgacaaggttatcaaggctgcccaggatatgaacttggaacccagccaagtaacaagccggtttattgatgccttttttgaagatacagagtccttgaatgttagacgggcggatgcccatcctacagttaccgaaaatatagacaatattatagacttcaaccaagtcttaattgacaagggctatgcttatgaatctgaaggggatgtctactaccgaacccggaaatttaaagactacggcaagttaagcgggatttcggttgaccaactcgctagtggtgccagcaatcgcttagacgaggcggaccgaggtaaaaaagaagatccactagactttgccttgtggaagcaggccaagccaggggagatttactggaaatccccttgggggcaaggtcgaccaggctggcacattgaatgctcggttatggccagccaagaattaggcgataccattgatatccacgcaggaggccaggacctacaattcccccaccatgaaaatgaaatcgcccaatctgagggcaaaagtggccaagcctttgccaattactggctccacaacggctttgtcaccatgaacgacgaaaagatgtccaagtccttgggcaactttaaactggtccacgacttgagaaaaatccataatccccaaacccttcgctttttcctagcttcggcccactaccgcagacccatcaattattccgaagaggccatacatgaagccaagcaaaatttgaaccgtattaagacagccttggccaatgcccgccaccgtttgcagacagcccaggaaactttaccagaagatcaaaaagatattacagcttggcaaaatcttaaggatagctttatccaggatatggacgatgacttccaggctcaaaacggaatagcagacctttatgaaatgatcgctagtctcaaccgctatattgctagagaccaggtgtctaaacaagtgattgacctctacctagaggacttaaaagccatcctctatatcttcggggtagaaggtgttgaagctgaagaggatttattagatggggaaatcgaagccctcatcgaagagcgccagcaagctcgagctgaccgcaactttgaccgggcagatgaaatcagggatgacctccgtgaccggggaattattctagaagatacccctcatggtgttcgttggaagcggaagtctcgggatgaagaataa

SEQ ID NO: 1952 - protein, 475 aa, Alloiococcus otitidis
MIKVYNTLTNKKEPFETIEEGKVTMYVCGPTVYNYIHIGNARSAVAFDTIRKYLEYRGYQVKYVSNFTDVDDKVIKAAQDMNLEPSQVTSRFIDAFFEDTESLNVRRADAHPTVTENIDNIIDFNQVLIDKGYAYESEGDVYYRTRKFKDYGKLSGISVDQLASGASNRLDEADRGKKEDPLDFALWKQAKPGEIYWKSPWGQGRPGWHIECSVMASQELGDTIDIHAGGQDLQFPHHENEIAQSEGKSGQAFANYWLHNGFVTMNDEKMSKSLGNFKLVHDLRKIHNPQTLRFFLASAHYRRPINYSEEAIHEAKQNLNRIKTALANARHRLQTAQETLPEDQKDITAWQNLKDSFIQDMDDDFQAQNGIADLYEMIASLNRYIARDQVSKQVIDLYLEDLKAILYIFGVEGVEAEEDLLDGEIEALIEERQQARADRNFDRADEIRDDLRDRGIILEDTPHGVRWKRKSRDEE

SEQ ID NO: 1953 - DNA, 1539 bp, Alloiococcus otitidis; identical to SEQ ID NO: 1951
  CDS (97)..(1536)

SEQ ID NO: 1954 - protein, 480 aa, Alloiococcus otitidis
MEACSMIKVYNTLTNKKEPFETIEEGKVTMYVCGPTVYNYIHIGNARSAVAFDTIRKYLEYRGYQVKYVSNFTDVDDKVIKAAQDMNLEPSQVTSRFIDAFFEDTESLNVRRADAHPTVTENIDNIIDFNQVLIDKGYAYESEGDVYYRTRKFKDYGKLSGISVDQLASGASNRLDEADRGKKEDPLDFALWKQAKPGEIYWKSPWGQGRPGWHIECSVMASQELGDTIDIHAGGQDLQFPHHENEIAQSEGKSGQAFANYWLHNGFVTMNDEKMSKSLGNFKLVHDLRKIHNPQTLRFFLASAHYRRPINYSEEAIHEAKQNLNRIKTALANARHRLQTAQETLPEDQKDITAWQNLKDSFIQDMDDDFQAQNGIADLYEMIASLNRYIARDQVSKQVIDLYLEDLKAILYIFGVEGVEAEEDLLDGEIEALIEERQQARADRNFDRADEIRDDLRDRGIILEDTPHGVRWKRKSRDEE

SEQ ID NO: 1955 - DNA, 441 bp, Alloiococcus otitidis
  CDS (43)..(438)
aagatacccctcatggtgttcgttggaagcggaagtctcgggatgaagaataaggatgtccaactcttaaacggactggccctggcctatatgggggatgcggtttacgaactatatattagacgctacttactggagaaaggatcgaccaaacctaaccgtctccaccaaagcgcaacccactatgtttcagccaaggcccaggcaaggctcattgaccaggccttggaccaagaccttttgacgtctgaggagcttggaatttttaaaagaggccggaatgctaagagctactccaaggccaaaaatacaagccaggcagactacaataagtcttctggttttgaggcagttatgggctacctttacttaactgaccaggtaggacggctggaagaattaattaactggtgcatccggtctgtggaagcaggcctctag

SEQ ID NO: 1956 - protein, 132 aa, Alloiococcus otitidis
MKNKDVQLLNGLALAYMGDAVYELYIRRYLLEKGSTKPNRLHQSATHYVSAKAQARLIDQALDQDLLTSEELGIFKRGRNAKSYSKAKNTSQADYNKSSGFEAVMGYLYLTDQVGRLEELINWCIRSVEAGL

SEQ ID NO: 1957 - DNA, 441 bp, Alloiococcus otitidis; identical to SEQ ID NO: 1955
  CDS (13)..(438)

SEQ ID NO: 1958 - protein, 142 aa, Alloiococcus otitidis
MVFVGSGSLGMKNKDVQLLNGLALAYMGDAVYELYIRRYLLEKGSTKPNRLHQSATHYVSAKAQARLIDQALDQDLLTSEELGIFKRGRNAKSYSKAKNTSQADYNKSSGFEAVMGYLYLTDQVGRLEELINWCIRSVEAGL

SEQ ID NO: 1959 - DNA, 786 bp, Alloiococcus otitidis
  CDS (19)..(783)
agcccactttgcccatcgatgtttaattattgggaggaaaccatgaccaagcaagaaagtgaaatcgtatttggccgccatccagtcctggaagctttgaagtctggccggcaaattaacaaggtctttatccaggatggatcaggagcacaagctttgaaagacattcatcatttggccaaggataagaaaattcaggtcagctttgttcctaaaaacaaactggaccagctcgtttcgggccaaaaccaccaaggggtcgttttaacagcaagccccgtagcttatgctagacttgatgacctttaccaagtggctagggacaaggaagaggcccccttctttttaatcttggatggaatagaagatcctcataatttgggttctattttgcgaaccgctgatgctagcggggtacatggcgttatcattcctaaccgccgggctgttggcttaaccgcaacagtttccaaggcttcgactggggccatcgaacatgtccctgttgcccgggtcagcaatattaaccaaaccatcaaaaaattgaaagatgatggcttttggatttacggaacggatatagaaggagaagattaccgtcaatggaatgtttcaggacccatcgccttggtggtaggcaatgagggccaaggtatttcccatctggtcaaggaaaatgtggaccaaatgcttaccattcctatgaccggccatgtgcaaagtctgaacgctagcgttgcctctgccatcttaatgtatgaagtttatcgaaagcgaaaaccttaa

SEQ ID NO: 1960 - protein, 255 aa, Alloiococcus otitidis
MFNYWEETMTKQESEIVFGRHPVLEALKSGRQINKVFIQDGSGAQALKDIHHLAKDKKIQVSFVPKNKLDQLVSGQNHQGVVLTASPVAYARLDDLYQVARDKEEAPFFLILDGIEDPHNLGSILRTADASGVHGVIIPNRRAVGLTATVSKASTGAIEHVPVARVSNINQTIKKLKDDGFWIYGTDIEGEDYRQWNVSGPIALVVGNEGQGISHLVKENVDQMLTIPMTGHVQSLNASVASAILMYEVYRKRKP

SEQ ID NO: 1961 - DNA, 2139 bp, Alloiococcus otitidis
  CDS (1)..(2136)
atggtttcccaaagggttgattttagtgatccaaagtattttgagaaccgtgagttatcatggttagatttcaatgaacgggttatcgcccaagccgaagatgaccgcaaccccttgcttgaacaattgaaatttatttccatcgggtcttccaacctggatgaatttgtccgagttagggtggctggtctccaagaccaatccaaattaggggttacagatccggataccaaaaagcaatggtctcccaatagacaattagacgaaattgctagtcgcaatgaaaaaaatgtcaaataccaatatggcctctataagaaaaaaatggccgagctcaaagaagttggcgtcaaggcaccagaaacccagctacttgaaggcttagacagccaggccttgcgggattatttcgctgaaaatatccaaccaggcatcaccccctacggcattgatgcttaccgccccttcccccatctgaatgacggcctgatccatattttcgtcaaacttgagcgagacggcaatccctatattgctattgtgccagttccgtctctcttagaccgaatccagcagatcaagttgaatggtgaagaaaaatatgtcttgattgaagatattatccggcaaaacatcgatgccctcttcaagggcttccaagtccagtattctttctttttccgtatcacccggaatgctgacttagaactacaagagcaaggagcggaagacctcttatctgttattgaagactacattgaacggcggaagaacggtatggctgtccgcttagaagttgatacccgggacgccgacccccgctatgccgacgatgttgcctttttaatggaagagttggatctcctagaacgtgacgtttatgccctagatggtcctctagacttgacctttctaatggacctctacgacctcttggaagacgttcacccagacctgaccttcgagcctttcagtccaacctacccgcccgttttaattagacggtcggtttttgatggggctgacaagcaggatatcttcctccaccacccttacgattccttcaaacccatcatcgagatgattgaaaaatcagccgacgaccccaacaccattgccattaagatgaccctctaccgggtctccaaggattccccgctggtagctgccatgaaaaaagcagccaaaagagggattcaagtaaccgctctggtagaactcaaggcccgttttgatgaagctaacaatgtccactgggctaaggagctcgaggaagctggagtccacatcatctacggtatggaggagttaaaaacccacagtaaggcaaccctagtggttaagaaaacccctaatggcttccgccgttatgcccatctagggaccggtaactacaacgaaaaaaccgccaacctctataccgacatggggatcattaccagccaaccagacttaaccgaagatgtggctaagttctttaactacctgagtggttattctgaacagcccgactacaaccacctccatgtttccccctttgaaatccgagatacctttatcgaaaaaattaacaatgaaattgcctcccacaaaaaacatggcaacggccacattattgctaagatgaactccttaacagacaaggtcatcatcttgaaactttttgaagccagccaggaaggggtcaaaattgacctgatcgttcggggcatttgctgcctgattcctggagtcaagggtgtgagtgaaaatatcacagttcgatccatagtcggccgcttcttagaacatagccggatctactacttctaccaaaatggccaagaaaaactctatctttcttctgccgatatgatgacccggaatatgatccgccgggtagaactagctttcccagtcatggacaagaactgggcccagcacattatcgacctcttagacctgtacctgagtgacaataccaaggcttgggtcttggacagtgacggtaattacagccaagagcaacccaaagaagacgaagaggcaatcagtgttcaatactctctcttgaaaaaatcccaaaatctcaaagaagagcgaaaggaaaaagaacggaaaaattggttcgcccgcctctctgagaaattactccggtaa

SEQ ID NO: 1962 - protein, 712 aa, Alloiococcus otitidis
MVSQRVDFSDPKYFENRELSWLDFNERVIAQAEDDRNPLLEQLKFISIGSSNLDEFVRVRVAGLQDQSKLGVTDPDTKKQWSPNRQLDEIASRNEKNVKYQYGLYKKKMAELKEVGVKAPETQLLEGLDSQALRDYFAENIQPGITPYGIDAYRPFPHLNDGLIHIFVKLERDGNPYIAIVPVPSLLDRIQQIKLNGEEKYVLIEDIIRQNIDALFKGFQVQYSFFFRITRNADLELQEQGAEDLLSVIEDYIERRKNGMAVRLEVDTRDADPRYADDVAFLMEELDLLERDVYALDGPLDLTFLMDLYDLLEDVHPDLTFEPFSPTYPPVLIRRSVFDGADKQDIFLHHPYDSFKPIIEMIEKSADDPNTIAIKMTLYRVSKDSPLVAAMKKAAKRGIQVTALVELKARFDEANNVHWAKELEEAGVHIIYGMEELKTHSKATLVVKKTPNGFRRYAHLGTGNYNEKTANLYTDMGIITSQPDLTEDVAKFFNYLSGYSEQPDYNHLHVSPFEIRDTFIEKINNEIASHKKHGNGHIIAKMNSLTDKVIILKLFEASQEGVKIDLIVRGICCLIPGVKGVSENITVRSIVGRFLEHSRIYYFYQNGQEKLYLSSADMMTRNMIRRVELAFPVMDKNWAQHIIDLLDLYLSDNTKAWVLDSDGNYSQEQPKEDEEAISVQYSLLKKSQNLKEERKEKERKNWFARLSEKLLR

SEQ ID NO: 1963 - DNA, 1575 bp, Alloiococcus otitidis
  CDS (175)..(1572)
attggagtccctattttggttcatacaaacaagcaagctaaccgcatcggcttgattgatgttgggtctaacaccatccgcctggtcatctttgaaatcgatgctgtcaatagttttagagaaattttaaacattaaaaacccagcccggctagtccaatacctagatggaaccatgatgtctgaccaaggaattgacctcttaattgacatcctaaaaaattacgcggatattgccaagctctacaagattaaacaacttatccccatcgccacagccgctatccggcaatctgacaacgccatccggatcctacagcgggttaaggaggaaactggggtcgatttggaactgctttccgaaaaaaaagaagcctactacggcaactatgctgtccgccacaccctccctatccaagatgggatcagcattgacattggcggtggttcaaccgaattaaccctctttaaggacaaacaagtccgggccagccatagttttccctttggaactgtcagcttaaaacaacattttttccaagacaaggaccacaacgatgctaaggccatcaaaaaagctcgtaagtgggtagctgaccaattccaggaattttcttggctaaaggactgccaggtgcctctgattggggttggggggtcggctcgaaatattgcggaagtttaccagcaccaggaagactatcccttggctggaattcacggttactcaatggggcaagctgccttggaccaggtttttaatacctttactgaaacctcctttaaagacttgtcagacttggacggtttgtcatctgaccgccgagacattatcatccccgcgactattgtttttatggaattatttaaggtcatggatgcgactgcctttgttgtctctagttacggaatccgggaaggtctcattattgagtacattaaccgactgccctaccacccctactctttgcactttattcagcaacaaaccgtttaccggatggccaaacagtaccggatgatggacttgccagctagtcaacgcatgaacattatgagtcgtctactggatgttttagctgacttggacatcctccacccctctatcttagacgttgaattcgcccactttggggcagccctttactacctaggcaaggtgatcgaagacaaggccgaatcccagcacaccttctacctgatctccaataccaacttaaagggctttacccataaagaccgggtgaaattggccttgattgcaagttataagaacaagtccctcttccaccagtacaccaagtcgaccagcgactggttcactcaagatgagttagacatgatcctctgtctaggctctctagccaaatttgctgaagctctcaacgactcccatgttaatacggtcgaaaacatcgacctagaaaaaggaaaagaaggctataatctgaccgttagatataagggcaatatcatcgccgaacgttaccgggccgaaaagcagcgcaaccatctagagcgggttatcggcgacaaggttgacatccattttatcgatgcccaggatgaccagtaa

SEQ ID NO: 1964 - protein, 466 aa, Alloiococcus otitidis
MMSDQGIDLLIDILKNYADIAKLYKIKQLIPIATAAIRQSDNAIRILQRVKEETGVDLELLSEKKEAYYGNYAVRHTLPIQDGISIDIGGGSTELTLFKDKQVRASHSFPFGTVSLKQHFFQDKDHNDAKAIKKARKWVADQFQEFSWLKDCQVPLIGVGGSARNIAEVYQHQEDYPLAGIHGYSMGQAALDQVFNTFTETSFKDLSDLDGLSSDRRDIIIPATIVFMELFKVMDATAFVVSSYGIREGLIIEYINRLPYHPYSLHFIQQQTVYRMAKQYRMMDLPASQRMNIMSRLLDVLADLDILHPSILDVEFAHFGAALYYLGKVIEDKAESQHTFYLISNTNLKGFTHKDRVKLALIASYKNKSLFHQYTKSTSDWFTQDELDMILCLGSLAKFAEALNDSHVNTVENIDLEKGKEGYNLTVRYKGNIIAERYRAEKQRNHLERVIGDKVDIHFIDAQDDQ

SEQ ID NO: 1965 - DNA, 1575 bp, Alloiococcus otitidis; identical to SEQ ID NO: 1963
  CDS (16)..(1572)

SEQ ID NO: 1966 - protein, 519 aa, Alloiococcus otitidis
MVHTNKQANRIGLIDVGSNTIRLVIFEIDAVNSFREILNIKNPARLVQYLDGTMMSDQGIDLLIDILKNYADIAKLYKIKQLIPIATAAIRQSDNAIRILQRVKEETGVDLELLSEKKEAYYGNYAVRHTLPIQDGISIDIGGGSTELTLFKDKQVRASHSFPFGTVSLKQHFFQDKDHNDAKAIKKARKWVADQFQEFSWLKDCQVPLIGVGGSARNIAEVYQHQEDYPLAGIHGYSMGQAALDQVFNTFTETSFKDLSDLDGLSSDRRDIIIPATIVFMELFKVMDATAFVVSSYGIREGLIIEYINRLPYHPYSLHFIQQQTVYRMAKQYRMMDLPASQRMNIMSRLLDVLADLDILHPSILDVEFAHFGAALYYLGKVIEDKAESQHTFYLISNTNLKGFTHKDRVKLALIASYKNKSLFHQYTKSTSDWFTQDELDMILCLGSLAKFAEALNDSHVNTVENIDLEKGKEGYNLTVRYKGNIIAERYRAEKQRNHLERVIGDKVDIHFIDAQDDQ

SEQ ID NO: 1967 - DNA, 1845 bp, Alloiococcus otitidis
  CDS (49)..(1842)
acagacctcatctcaaagctagctgtacagaaaggaggatctggtcagatggctaatgaaagagtcgaaaataagctaaaagtcttacccggcaagccgggctgctatttgatgaaggataaggacgggcatattatctacatcggcaaggccaaaaacttgaagaaccgagtccggtcttactttaagagtagtcataccgggaaaacagcccgcttggtgagtgaaatagccgattttgaatacattttaaccggttcagacaaggaagctctcttacttgaagtatccctgatccaaaagcacaagccccagtataatatcctcctaaaatatgggacgacctacccttacttgaagattaccaatgagcgggaccccagattggtgatcgattcagagatcaaaaaagatggtgccaagtactttggcccttatcctaatgtgggggctgccatgcagacccagcaactcctgcacaagatctaccccctaagacggtgccccaaaaaccaaaaaagaccctgtctctattaccatatgggtcagtgtattgggccatgtgaccatgaggtttccaaggaagagtacaaggagcaaattgccaagattgagtctttcctcaaagggaatgtaaaagatatcaaggccgacctgaagcaaaaaatggaagaagcttccgcaaacttgaactatgaagcggcagctgaattccgagaccagatttcctatatcgaaacaacagtcgagaagcaggctattgtctccaacgactttgtggaacgggactttttcaacttttacatggacaagggctggatctctatccaggttttctttgtccgccaggctaccctgatcaaaagagaagccgctatgtttccttgctatgacccgcccgaagaggaattgatgagttttatcgtccagtattaccaagagaaaaacaatttactgcccaaggaaatttttgtcccgccaggtttggacttggacctcttggctgatatcttggacactaaactccatgtcccccaaagaggggagaaaaaacacctcttagaccttgcttataaaaactccaagcaggctctacaagagcgctttaacctaattgaaatgaagcaaagaaaaaccacaggagctgtgaaagacctgtcccaagccttgggtctaccctaccttaaacacattgaagcctttgaccactccaacatccaaggtactaatcccgtttcggccatggttgcctttaaggatggcaaggaagacaagcaaaactaccgcaagtacaaggtcaagacggttgaaggggctaatgaggcagccacaactaccgaggtcattcgcagacggtttacccggctcttgaaagaaggcaaggccctgcctgacttggtcttaatggacggaggaaaggtccaagtgaatgccgctgtcgatgttatccaacatgaacttggtcagtctaccccagtggccggcatggttaaggatgataagcataagacagccggattgatctttggcgaaaacttagaccccgttcccctcgacccaagaagtcaggccttctacttggtccaacgcatacaggatgaagtccaccgctttgccatttctttccaccgcaatgtccgtagcaaaaattcctttagttcggaactggaccagatcacaggcgtgggtcccaaaacccggaccaagctcctccgccacttccggtcaatgaaaagactaaaagaagcaagccaagatgacatccgggaattggggatcaatcggaaagttgctcaaagaattgtcgactttttacacgaaaaagacagggaagaagtcaagtaa

SEQ ID NO: 1968 - protein, 598 aa, Alloiococcus otitidis
MANERVENKLKVLPGKPGCYLMKDKDGHIIYIGKAKNLKNRVRSYFKSSHTGKTARLVSEIADFEYILTGSDKEALLLEVSLIQKHKPQYNILLKYGTTYPYLKITNERDPRLVIDSEIKKDGAKYFGPYPNVGAAMQTQQLLHKIYPLRRCPKNQKRPCLYYHMGQCIGPCDHEVSKEEYKEQIAKIESFLKGNVKDIKADLKQKMEEASANLNYEAAAEFRDQISYIETTVEKQAIVSNDFVERDFFNFYMDKGWISIQVFFVRQATLIKREAAMFPCYDPPEEELMSFIVQYYQEKNNLLPKEIFVPPGLDLDLLADILDTKLHVPQRGEKKHLLDLAYKNSKQALQERFNLIEMKQRKTTGAVKDLSQALGLPYLKHIEAFDHSNIQGTNPVSAMVAFKDGKEDKQNYRKYKVKTVEGANEAATTTEVIRRRFTRLLKEGKALPDLVLMDGGKVQVNAAVDVIQHELGQSTPVAGMVKDDKHKTAGLIFGENLDPVPLDPRSQAFYLVQRIQDEVHRFAISFHRNVRSKNSFSSELDQITGVGPKTRTKLLRHFRSMKRLKEASQDDIRELGINRKVAQRIVDFLHEKDREEVK

SEQ ID NO: 1969 - DNA, 945 bp, Alloiococcus otitidis
  CDS (100)..(942)
ggttttttatttaacttgaatccatgcttagtcaaagactatcgaaagttcaaacagttcccttactttaactcaaatgtcataggaggtaggtcagagatggtaaagtcattctgccttaaaaattctctattactaataaccggaagtttattattaactggctgcggtcaaagtgaagaagcaaatcaaggtctctatgaagacggagtcctatcagtcggcgttactgctggaccagctgaagaagtcatgaattttgtaaaagatcaagctgcagaagatgactttaatattgaagtggtcgtctttaacgactatgtccaacccaatgttgccttagacgatgaatccttggatgctaattcattcatgacgcaaccattcttggaggatgtgatggaagaacaagattacgactttgtcccactagctcgaactattaccttacccatggccctccactcctataacttagatagtgttgaagaaattcctgataatgcaagtattggtattcccaactcccctacccaagaaggtcgagccttacaactcattgctgctcagggtttgatcaccttgcctgatgattctggtttagaggtcgtagtggatgatattgttgacaaccctaaaaaccttgaatttatcacttctgatccagcccaacttcccatccagctgaaagatttggatgccgctgcaattaactccaattttgccatcgattctggcctgggagtgacggaatatagcatagctgttgaaagtgatgatgaactccttcgtcaggccaactttatcgtagcgagggaagaaaatgaagaggacgaggcactggcaagattagttaattattaccaaacagatactgttaaagaatttatcgaagactactatgaaggagcggtcgttccagcctgggacttaggtgaagaataa

SEQ ID NO: 1970 - protein, 281 aa, Alloiococcus otitidis
MVKSFCLKNSLLLITGSLLLTGCGQSEEANQGLYEDGVLSVGVTAGPAEEVMNFVKDQAAEDDFNIEVVVFNDYVQPNVALDDESLDANSFMTQPFLEDVMEEQDYDFVPLARTITLPMALHSYNLDSVEEIPDNASIGIPNSPTQEGRALQLIAAQGLITLPDDSGLEVVVDDIVDNPKNLEFITSDPAQLPIQLKDLDAAAINSNFAIDSGLGVTEYSIAVESDDELLRQANFIVAREENEEDEALARLVNYYQTDTVKEFIEDYYEGAVVPAWDLGEE

SEQ ID NO: 1971 - DNA, 945 bp, Alloiococcus otitidis; identical to SEQ ID NO: 1969
  CDS (16)..(942)

SEQ ID NO: 1972 - protein, 309 aa, Alloiococcus otitidis
MNPCLVKDYRKFKQFPYFNSNVIGGRSEMVKSFCLKNSLLLITGSLLLTGCGQSEEANQGLYEDGVLSVGVTAGPAEEVMNFVKDQAAEDDFNIEVVVFNDYVQPNVALDDESLDANSFMTQPFLEDVMEEQDYDFVPLARTITLPMALHSYNLDSVEEIPDNASIGIPNSPTQEGRALQLIAAQGLITLPDDSGLEVVVDDIVDNPKNLEFITSDPAQLPIQLKDLDAAAINSNFAIDSGLGVTEYSIAVESDDELLRQANFIVAREENEEDEALARLVNYYQTDTVKEFIEDYYEGAVVPAWDLGEE

SEQ ID NO: 1973 - DNA, 567 bp, Alloiococcus otitidis
  CDS (175)..(564)
gaagagagatcgtttcaagtcttaaggagcatcaccatggttgttcaactctacatgaaagaaaaaagtccctacctggctaatcagagaatcgtcaagaccccgtccaaccgagacctttttgtggtagaaggaagctggggtaggcggaacgacaaaattttcctctacactatggctggccactgcctagtggaggtgaagcaagtaaccctttctgtctaccctaaatttaaggccaagatgaacgggcacacagtggctattattaaaaaacgcccccgactcttggctcagccagtctacactgtttccaagcttggctggaaggcatcaggcaactatttaaaaagaagttacaaggtcaagcgaaaattcaaaaccattatgactgtggaaaaagctgtgacaactttcggggagttttgcagcttggaaatcaccaatcccgaagatgcccccctgtgctgtgtcttggccgttttaatcgaccattacgcccaaggtaaatcacagggaaaaaaacgggccaaaaagcctgaccaaattttacaagagcaaatctaa

SEQ ID NO: 1974 - protein, 130 aa, Alloiococcus otitidis
MAGHCLVEVKQVTLSVYPKFKAKMNGHTVAIIKKRPRLLAQPVYTVSKLGWKASGNYLKRSYKVKRKFKTIMTVEKAVTTFGEFCSLEITNPEDAPLCCVLAVLIDHYAQGKSQGKKRAKKPDQILQEQI

SEQ ID NO: 1975 - DNA, 567 bp, Alloiococcus otitidis; identical to SEQ ID NO: 1973
  CDS (37)..(564)

SEQ ID NO: 1976 - protein, 176 aa, Alloiococcus otitidis
MVVQLYMKEKSPYLANQRIVKTPSNRDLFVVEGSWGRRNDKIFLYTMAGHCLVEVKQVTLSVYPKFKAKMNGHTVAIIKKRPRLLAQPVYTVSKLGWKASGNYLKRSYKVKRKFKTIMTVEKAVTTFGEFCSLEITNPEDAPLCCVLAVLIDHYAQGKSQGKKRAKKPDQILQEQI

SEQ ID NO: 1977 - DNA, 177 bp, Alloiococcus otitidis
  CDS (1)..(174)
atgatggtaaatattgatcttttgcaggcgctggtagatgccattagcaatattggcttccccatcttcattaccctcttcctccttcaccggatggaagccaaggtagacaacttggtcaaggcaatccacgacttaagtcaagtgatcagccaagaccaagaaaccagcaaatag

SEQ ID NO: 1978 - protein, 58 aa, Alloiococcus otitidis
MMVNIDLLQALVDAISNIGFPIFITLFLLHRMEAKVDNLVKAIHDLSQVISQDQETSK

SEQ ID NO: 1979 - DNA, 852 bp, Alloiococcus otitidis
  CDS (28)..(849)
atcattttatatataggaggctattttatgtcaatcgatgcaaaaacaacttggactattgctggtaacgatgctagtgggggagccgggattgctgccgacttgaaaacttttgccgaatacggcacttacgggatcgcttccctcacaacggttgcttccatgagaccagaagactggaagcacatcgtctctcctatcccactggaaaccctagaaatccaaattaccactgttttatccaaagaagatggggtcgacgccttcaaaactggtatgatccctaacaaggaacagatcgacctgattgaaaaaatcatcaaggaccaccagttagaggacaaatttgtcctagacccagttatggtctgcaagggtgacgatgaagtcttaaacccagagttagcgataggcttgcgggaccaactcttacctctagctaagattgtcactcctaacctcttcgaagctggacagttagctgatgtcgacaagccaaccaccctagaccaaatgaaagaagctgccaaaatcatccatgacagaggagctgactatgtcgtcatcaagggtggtactgacattgaaggtgacaaggccactgacctattctatgacggtaatgaatttaccacctttgaagcagacaaaatcgataatggggccaaccacggggccggttgtacctatgcggcagctattacagctggttatgccaatggcttaagcccacttgaagcagtgaaaaaagccaaagactttgtcactgacggaattatttacggcctggactacaacaaacacgtttctcctgtctttcacagtgcccaccgtctaaaccaagacaattaa

SEQ ID NO: 1980 - protein, 274 aa, Alloiococcus otitidis
MSIDAKTTWTIAGNDASGGAGIAADLKTFAEYGTYGIASLTTVASMRPEDWKHIVSPIPLETLEIQITTVLSKEDGVDAFKTGMIPNKEQIDLIEKIIKDHQLEDKFVLDPVMVCKGDDEVLNPELAIGLRDQLLPLAKIVTPNLFEAGQLADVDKPTTLDQMKEAAKIIHDRGADYVVIKGGTDIEGDKATDLFYDGNEFTTFEADKIDNGANHGAGCTYAAAITAGYANGLSPLEAVKKAKDFVTDGIIYGLDYNKHVSPVFHSAHRLNQDN

SEQ ID NO: 1981 - DNA, 426 bp, Alloiococcus otitidis
  CDS (181)..(423)
tcagctcctctgtcatggatgattttggcagcttctttcatttggtctagggtggttggcttgtcgacatcagctaactgtccagcttcgaagaggttaggagtgacaatcttagctagaggtaagagttggtcccgcaagcctatcgctaactctgggtttaagacttcatcgtcacccttgcagaccataactgggtctaggacaaatttgtcctctaactggtggtccttgatgattttttcaatcaggtcgatctgttccttgttagggatcataccagttttgaaggcgtcgaccccatcttctttggataaaacagtggtaatttggatttctagggtttccagtgggataggagagacgatgtgcttccagtcttctggtctcatggaagcaaccgttgtgagggaagcgatcccgtaa

SEQ ID NO: 1982 - protein, 81 aa, Alloiococcus otitidis
MQTITGSRTNLSSNWWSLMIFSIRSICSLLGIIPVLKASTPSSLDKTVVIWISRVSSGIGETMCFQSSGLMEATVVREAIP

SEQ ID NO: 1983 - DNA, 939 bp, Alloiococcus otitidis
  CDS (52)..(936)
tcctgcttttctgataatatacaaacagaaagctataaaggagataggcaaatgattaaactaattgtgtcagacatggacggaaccctgctcaatgaacaagttgggctctctgccgccaatgtagccgccattaaagatgcccaagcagcggggattgactttgttatcgcgacaggccggtctttcaagtcaggctacaccatggctgaagaaaagggcattacctgcccctttatcggacaaaatggggccacctattacaatgaccagcaagagctccaatatgttagaggcctggccaaggatgatgtccgaaagatgatggagatttttgaccaaacccctatttactatgaacttattacctttgacggcccttataccaatgacaagcaggccttcatcgaccatgccttcgacacctttaccgatatcaaccaggacattgatgaggaagccatccggtcttacattaccgacatggttgaccaaaaccggattaactttgtcgagtcatataacactcttttagaagatgatgaccaaatcatcttgaaaatcgctgttttttcgacatctggatctaacaagttagaaaaagttcaaaaacgattagaaaaagaaatagacaatatatccattactgcctcaagccgtaaaaacatggaaattaaccacatccgcgccagcaaggggcaagcggtcagtgaatatgctaagctgaagggctacaagccttcagaagtcctaactattggcgacaacatcaatgacttatccatgctagactgggcggattacgggacagccatggcaaatgctgtgcctgaggccaaggctattgccaaataccaaaccaagtccaacagccaagacggggtggcccatatcatcaacctggtcctcaaaggtgaaatcgaccaggccaagctttaa

SEQ ID NO: 1984 - protein, 295 aa, Alloiococcus otitidis
MIKLIVSDMDGTLLNEQVGLSAANVAAIKDAQAAGIDFVIATGRSFKSGYTMAEEKGITCPFIGQNGATYYNDQQELQYVRGLAKDDVRKMMEIFDQTPIYYELITFDGPYTNDKQAFIDHAFDTFTDINQDIDEEAIRSYITDMVDQNRINFVESYNTLLEDDDQIILKIAVFSTSGSNKLEKVQKRLEKEIDNISITASSRKNMEINHIRASKGQAVSEYAKLKGYKPSEVLTIGDNINDLSMLDWADYGTAMANAVPEAKAIAKYQTKSNSQDGVAHIINLVLKGEIDQAKL

SEQ ID NO: 1985 - DNA, 855 bp, Alloiococcus otitidis
  CDS (169)..(852)
gaaaaagatctctttaatataacgaatgttgcacatctaagaaaaagacttttttggccttggtctattccagacttgctggtaccatctcgttttaagaaagaaccagggtcaaaacttgtcgccaggcgattgagcctttacaataaagaagaaaagagggatgacatgacaattccaattcacaatgaatgggagcctgttttagaccgggctagccgaactaaaagttaccagaaattaagagaatttctcaaaaaagaatactttaaccaccaagtctatccagctatggaggacttgtggaacgcctttgacctgactgactatgatgaggtcaaggctgtgatcctgggccaagatccctaccacggacccaaccaggctcatggtctggccttttctgttagacctggccaagaggtccccccgtctttacaaaatatctataaggaactccaagatgacttgggttgttctatccccaaccatggttgcctcaacgcttgggccaaagaaggggttttgctcctcaataccgttttaaccgttcgagctcaccaagctcattcccaccgaggtaagggctgggaagagttgacagaccaggtgatccagtccctcaaccaacggaacaagcctatggtttttatcctttggggaagggcagcccgggataagaaggccatgattgacacaagcaagcatggggtggtcgaaagtccccatcccagccccttatcagcctaccgtggcttttttggatcccggcctttttctaaaaccaatcagtttttacaagaccatggtcaggcccccattgattggcaaattccagaccagccagttaattaa

SEQ ID NO: 1986 - protein, 228 aa, Alloiococcus otitidis
MTIPIHNEWEPVLDRASRTKSYQKLREFLKKEYFNHQVYPAMEDLWNAFDLTDYDEVKAVILGQDPYHGPNQAHGLAFSVRPGQEVPPSLQNIYKELQDDLGCSIPNHGCLNAWAKEGVLLLNTVLTVRAHQAHSHRGKGWEELTDQVIQSLNQRNKPMVFILWGRAARDKKAMIDTSKHGVVESPHPSPLSAYRGFFGSRPFSKTNQFLQDHGQAPIDWQIPDQPVN

SEQ ID NO: 1987 - DNA, 855 bp, Alloiococcus otitidis; identical to SEQ ID NO: 1985
  CDS (76)..(852)

SEQ ID NO: 1988 - protein, 259 aa, Alloiococcus otitidis
MLVPSRFKKEPGSKLVARRLSLYNKEEKRDDMTIPIHNEWEPVLDRASRTKSYQKLREFLKKEYFNHQVYPAMEDLWNAFDLTDYDEVKAVILGQDPYHGPNQAHGLAFSVRPGQEVPPSLQNIYKELQDDLGCSIPNHGCLNAWAKEGVLLLNTVLTVRAHQAHSHRGKGWEELTDQVIQSLNQRNKPMVFILWGRAARDKKAMIDTSKHGVVESPHPSPLSAYRGFFGSRPFSKTNQFLQDHGQAPIDWQIPDQPVN

SEQ ID NO: 1989 - DNA, 1017 bp, Alloiococcus otitidis
  CDS (10)..(1014)
aagtatcaaatggaaacttacggagggatagatttggaaattattgaaagcttgaaagataaggtcaagggtaaaggcgttcgcattgtcttcccagaagctcttgacgaacggattttgcaagcggtagttaggcttaaaaaagaaggcctcattaccccaatccttttgggcaaccctgaccaagttaatgagaaagctaaggaatttggctttagcatcgatggcttgactatcttggatccagaagattatgacgaatttgacgacttagtagcctccttcgtggaaagacgaaaaggaaaagctacagaagaagatgccaaaaaaatcctaaaagatgtcaactacttcggcaccatgctcgttcatactgaccgagcagatggcttggtttctggtgcagtccactctacaggagacaccgttagaccagccttgcaaattattaagaccaaagaaggagttagccggacatctggtgccttcttgatgctgagaggtcgaggccaagagcgttacatctttgcggactgtgctattaatccagacccagacaaggatgttttagcagaaattgccattgaaagtgccaagaccgctaaaatgtttgatatcgaccctaaagttgccctcttaagtttctcaaccaagggatctgctagtggtgaccaagttgacaaggtagcccaagccagtgagatcgtcaaggaaaaagatccagacttagcagttgatggggaacttcaatttgatgcagcctttgtcaacactgttgctaaacaaaaagcacctgattctgatgtagcaggagaagccaatgtatttgtcttccctgaactccaatccggcaacattggctataagattgcccaacgcttcggtaactttgaagcgattggacctgtcttgcagggtttgaataagcctatttcagacctatctcgcggatgcagtagtgaagatgtctacaacttatccttggttaccgcaacccaagccatcgcagaagattaa

SEQ ID NO: 1990 - protein, 335 aa, Alloiococcus otitidis
METYGGIDLEIIESLKDKVKGKGVRIVFPEALDERILQAVVRLKKEGLITPILLGNPDQVNEKAKEFGFSIDGLTILDPEDYDEFDDLVASFVERRKGKATEEDAKKILKDVNYFGTMLVHTDRADGLVSGAVHSTGDTVRPALQIIKTKEGVSRTSGAFLMLRGRGQERYIFADCAINPDPDKDVLAEIAIESAKTAKMFDIDPKVALLSFSTKGSASGDQVDKVAQASEIVKEKDPDLAVDGELQFDAAFVNTVAKQKAPDSDVAGEANVFVFPELQSGNIGYKIAQRFGNFEAIGPVLQGLNKPISDLSRGCSSEDVYNLSLVTATQAIAED

SEQ ID NO: 1991 - DNA, 480 bp, Alloiococcus otitidis
  CDS (13)..(477)
gagggaattaggatgtataacaatattataaccaccatgattgcagctggtattgcctctttaggctttgccattttatacaatgttccccgacgtgtcttgctggccaatgcgattattggggcagttggttgggctccttactatctcttaatcaatatctttgggtccgaactattcgttggagcaggcctagcctctctagtcatcgccctctccagccagttagccgcccgtaagtttggcctgcccgtgaccgttttttccattcctgccattatccccatcgtcccaggtggatcagcttataatgccatgcggtcttttgtcaccggtgagtacttcttggctacaggttacttcatcgacacctttattatcgctggcgccatcgccctcggtttaaccattaacactgctatcttccaagtcctttcacctaagtctattatccagcaaggtagacggtatttttcataa

SEQ ID NO: 1992 - protein, 155 aa, Alloiococcus otitidis
MYNNIITTMIAAGIASLGFAILYNVPRRVLLANAIIGAVGWAPYYLLINIFGSELFVGAGLASLVIALSSQLAARKFGLPVTVFSIPAIIPIVPGGSAYNAMRSFVTGEYFLATGYFIDTFIIAGAIALGLTINTAIFQVLSPKSIIQQGRRYFS

SEQ ID NO: 1993 - DNA, 819 bp, Alloiococcus otitidis
  CDS (376)..(816)
aaggccattcttttgctttataatcgaatagactttccacaaggaggtagtgaagtgacaacaatccaaaacgacttaaaggaatccgtcagtgtttgtgttgaagtaggccgattgatgctttccaatggggcagagacctaccgggtggaagacaccatctaccggatcggaacaagtttgggcatcaatgatgttagtgtctttgtggtgccaacagctatcattgttaccgcaagcgaccaatttgacgatgaggtaacccaactagcccgggttagcgacagagaaaccaacttagaaatgatttccatgatcaaccaattgtcacgtgacttatctaaaaatcccaagtcggccaatgaagtccgggtcatgctctaccgcatgcagctagatgtcaatgagtataaaccacttacatctatcttcttctcagccatgggaactggtgcctttgtcctcttgtttgacggaccctttattagtgtccctatcgcctttgtcttgggcgggattgcccaggcagtctttgagtatgtttcccaaatcaccaatgtctctttctttgccgaactcatcgctgcctctattgtgggtcttttggcatccctggctgttacattaggactaggagttaaccgtgacgtcattatcttaagttctgtcatgaccctggtccctggggtagccattactaacggattacgtgacctgatggccggccacctcctagctggggtgggaggcctgtccaaggcagcaatgacagccgccgccatcggtcttggcatcgccttagtcttgtcagtcatttag

SEQ ID NO: 1994 - protein, 147 aa, Alloiococcus otitidis
MLYRMQLDVNEYKPLTSIFFSAMGTGAFVLLFDGPFISVPIAFVLGGIAQAVFEYVSQITNVSFFAELIAASIVGLLASLAVTLGLGVNRDVIILSSVMTLVPGVAITNGLRDLMAGHLLAGVGGLSKAAMTAAAIGLGIALVLSVI

SEQ ID NO: 1995 - DNA, 819 bp, Alloiococcus otitidis; identical to SEQ ID NO: 1993
  CDS (118)..(816)

SEQ ID NO: 1996 - protein, 233 aa, Alloiococcus otitidis
MLSNGAETYRVEDTIYRIGTSLGINDVSVFVVPTAIIVTASDQFDDEVTQLARVSDRETNLEMISMINQLSRDLSKNPKSANEVRVMLYRMQLDVNEYKPLTSIFFSAMGTGAFVLLFDGPFISVPIAFVLGGIAQAVFEYVSQITNVSFFAELIAASIVGLLASLAVTLGLGVNRDVIILSSVMTLVPGVAITNGLRDLMAGHLLAGVGGLSKAAMTAAAIGLGIALVLSVI

SEQ ID NO: 1997 - DNA, 819 bp, Alloiococcus otitidis; identical to SEQ ID NO: 1993
  CDS (55)..(816)

SEQ ID NO: 1998 - protein, 254 aa, Alloiococcus otitidis
MTTIQNDLKESVSVCVEVGRLMLSNGAETYRVEDTIYRIGTSLGINDVSVFVVPTAIIVTASDQFDDEVTQLARVSDRETNLEMISMINQLSRDLSKNPKSANEVRVMLYRMQLDVNEYKPLTSIFFSAMGTGAFVLLFDGPFISVPIAFVLGGIAQAVFEYVSQITNVSFFAELIAASIVGLLASLAVTLGLGVNRDVIILSSVMTLVPGVAITNGLRDLMAGHLLAGVGGLSKAAMTAAAIGLGIALVLSVI

SEQ ID NO: 1999 - DNA, 819 bp, Alloiococcus otitidis; identical to SEQ ID NO: 1993
  CDS (13)..(816)

SEQ ID NO: 2000 - protein, 268 aa, Alloiococcus otitidis
MLYNRIDFPQGGSEVTTIQNDLKESVSVCVEVGRLMLSNGAETYRVEDTIYRIGTSLGINDVSVFVVPTAIIVTASDQFDDEVTQLARVSDRETNLEMISMINQLSRDLSKNPKSANEVRVMLYRMQLDVNEYKPLTSIFFSAMGTGAFVLLFDGPFISVPIAFVLGGIAQAVFEYVSQITNVSFFAELIAASIVGLLASLAVTLGLGVNRDVIILSSVMTLVPGVAITNGLRDLMAGHLLAGVGGLSKAAMTAAAIGLGIALVLSVI

SEQ ID NO: 2001 - DNA, 561 bp, Alloiococcus otitidis
  CDS (4)..(558)
ggaatgaaagaccaagacagcaagcagaaaaaaattatcatcctggttgggccaagtgggagtggaaaaaccaccctgggtcgggacttgtcaaagaatggttataaaaaattggtcaccacaaccacccgcaagcccagaccaggggaggtggacggaagagactactactttaaggatgaggccgaccttgatgccagtgactttgtcgagcaaacgatctacaacaaccatacttacggcctgactaaggctgaaattgaggcctccttaaagcagtttgatgtcgttcacgtgtctttagaacgcaatggggctcaggccctgaaggaactgtgccctgagcaggcagtggttatttttattgccatatcggaagaagtcatggctgagcggatgctaaagcggggcgaaagccaggacttggtcgaccaaaggctggactattgccggcggacgggggagctagagccacctagccttgcagattatgtgcttgaaaatcatgacctaaaagagtccttgacccgaatccaagacattattgaaacagaaatataa

SEQ ID NO: 2002 - protein, 185 aa, Alloiococcus otitidis
MKDQDSKQKKIIILVGPSGSGKTTLGRDLSKNGYKKLVTTTTRKPRPGEVDGRDYYFKDEADLDASDFVEQTIYNNHTYGLTKAEIEASLKQFDVVHVSLERNGAQALKELCPEQAVVIFIAISEEVMAERMLKRGESQDLVDQRLDYCRRTGELEPPSLADYVLENHDLKESLTRIQDIIETEI

SEQ ID NO: 2003 - DNA, 1053 bp, Alloiococcus otitidis
  CDS (19)..(1050)
ggagcgtttcataccaatatgaaagtttttgactacgaagatatccaactcatacctgccaagtccattgtcaaaagccggtcggaatgcgacaccagtgtcgacctgggtggccgccgttttaaattaccggttgtcccggccaacatgcaaaccgttatcgacgaaagcttagcttcctggctagctgaaaatggctttttctatgtcatgcaccggtttgacgaagacagtcgccagccttttatccgccgtatgcatgaccaggggctttttgcctccatcagcttaggggttaagcctggggagtatgattttgtccagcaactcgcaaaagaccaagatctcccagaatacattaccatcgatgtcgcccacggacactctgacatggtcatccaaatgatccagcatgttaaaaaacacctgccaaacagctttttaatcgcagggaatgtcgggacacctgaagcagtccgggaattggaaaacgctggggccgatgcaaccaaggttggcattggtccaggcaaggtctgcaccaccaagctcaagacaggctttgggaccggtggctggcaacttgcagccgtctccacctgctccaaggtagctcgcaagcccctcattgctgacggtggggtccggaccaatggtgatattgccaagtccatccgctttggggccagcatggtcatgatcgggtccatgttctccggccacgaccagtcgcctggtgacctgattaaaatcgacgggtctctttacaaggaatacttcggtagtgcttctgccactcagaaaggtcagcgtaaaaatgtcgaaggcaagaaaatgctggtcccgtataagggagatattgctgataccctggccgaaatgaaggaagacctccagtcctctatctcttatgcaggtggcaaggacttggaagccatccgtaaagtggactatgttattgtgaaaaattccattatgaatggggaaaattacaatgcctctggtattgatatccctgaaagcttggcctcttccaacttcgaccaagcctaa

SEQ ID NO: 2004 - protein, 344 aa, Alloiococcus otitidis
MKVFDYEDIQLIPAKSIVKSRSECDTSVDLGGRRFKLPVVPANMQTVIDESLASWLAENGFFYVMHRFDEDSRQPFIRRMHDQGLFASISLGVKPGEYDFVQQLAKDQDLPEYITIDVAHGHSDMVIQMIQHVKKHLPNSFLIAGNVGTPEAVRELENAGADATKVGIGPGKVCTTKLKTGFGTGGWQLAAVSTCSKVARKPLIADGGVRTNGDIAKSIRFGASMVMIGSMFSGHDQSPGDLIKIDGSLYKEYFGSASATQKGQRKNVEGKKMLVPYKGDIADTLAEMKEDLQSSISYAGGKDLEAIRKVDYVIVKNSIMNGENYNASGIDIPESLASSNFDQA

SEQ ID NO: 2005 - DNA, 660 bp, Alloiococcus otitidis
  CDS (16)..(657)
aaaagactggctaggatggtcctagccagtcttttgctagctttaaacttaggcttggtcgaagttggaagaggccaagctttcagggatatcaataccagaggcattgtaattttccccattcataatggaatttttcacaataacatagtccactttacggatggcttccaagtccttgccacctgcataagagatagaggactggaggtcttccttcatttcggccagggtatcagcaatatctcccttatacgggaccagcattttcttgccttcgacatttttacgctgacctttctgagtggcagaagcactaccgaagtattccttgtaaagagacccgtcgattttaatcaggtcaccaggcgactggtcgtggccggagaacatggacccgatcatgaccatgctggccccaaagcggatggacttggcaatatcaccattggtccggaccccaccgtcagcaatgaggggcttgcgagctaccttggagcaggtggagacggctgcaagttgccagccaccggtcccaaagcctgtcttgagcttggtggtgcagaccttgcctggaccaatgccaaccttggttgcatcggccccagcgttttccaattcccggactgcttcaggtgtcccgacattccctgcgattaa

SEQ ID NO: 2006 - protein, 214 aa, Alloiococcus otitidis
MVLASLLLALNLGLVEVGRGQAFRDINTRGIVIFPIHNGIFHNNIVHFTDGFQVLATCIRDRGLEVFLHFGQGISNISLIRDQHFLAFDIFTLTFLSGRSTTEVFLVKRPVDFNQVTRRLVVAGEHGPDHDHAGPKADGLGNITIGPDPTVSNEGLASYLGAGGDGCKLPATGPKACLELGGADLAWTNANLGCIGPSVFQFPDCFRCPDIPCD

SEQ ID NO: 2007 - DNA, 561 bp, Alloiococcus otitidis
  CDS (55)..(558)
agagacccgtcgattttaatcaggtcaccaggcgactggtcgtggccggagaacatggacccgatcatgaccatgctggccccaaagcggatggacttggcaatatcaccattggtccggaccccaccgtcagcaatgaggggcttgcgagctaccttggagcaggtggagacggctgcaagttgccagccaccggtcccaaagcctgtcttgagcttggtggtgcagaccttgcctggaccaatgccaaccttggttgcatcggccccagcgttttccaattcccggactgcttcaggtgtcccgacattccctgcgattaaaaagctgtttggcaggtgttttttaacatgctggatcatttggatgaccatgtcagagtgtccgtgggcgacatcgatggtaatgtattctgggagatcttggtcttttgcgagttgctggacaaaatcatactccccaggcttaacccctaagctgatggaggcaaaaagcccctggtcatgcatacggcggataaaaggctggcgactgtcttcgtcaaaccggtgcatgacatag

SEQ ID NO: 2008 - protein, 168 aa, Alloiococcus otitidis
MDPIMTMLAPKRMDLAISPLVRTPPSAMRGLRATLEQVETAASCQPPVPKPVLSLVVQTLPGPMPTLVASAPAFSNSRTASGVPTFPAIKKLFGRCFLTCWIIWMTMSECPWATSMVMYSGRSWSFASCWTKSYSPGLTPKLMEAKSPWSCIRRIKGWRLSSSNRCMT

SEQ ID NO: 2009 - DNA, 336 bp, Alloiococcus otitidis
  CDS (55)..(333)
gctttttctttttccagaggaagacaggttttaagggtcaagcttttcgtaaagatgaatgattctgagctccccaattctcatgcaggttcagtaagaccgagctggctagcccattgtcgcctttcagcttcaaaacttccttattttgttttattgtccagttttagcttcaaaacttcccttattttgatttattgtagagtcaagtccaaagaccaaactagcttaaggaatttattaaaaacaaagtcccagcttgcctttgactttagccagtatattgcgtatgatttacaggggaaagaaatcaacctaccgtatgctttagcttga

SEQ ID NO: 2010 - protein, 93 aa, Alloiococcus otitidis
MNDSELPNSHAGSVRPSWLAHCRLSASKLPYFVLLSSFSFKTSLILIYCRVKSKDQTSLRNLLKTKSQLAFDFSQYIAYDLQGKEINLPYALA

SEQ ID NO: 2011 - DNA, 273 bp, Alloiococcus otitidis
  CDS (166)..(270)
ctgagccccaacaagcatggtgaagagataccagattcctgccttaaattctttaagggcaaagaggaggaggctaataaccagggtcaggactgtttgcgaccagccgtccccaatagtggtcaggccaatgatgaccttggtccggtctggagatcggaactgatggaggtaattgccaatattataatctatttggctaaggctggtctggttataggccaagaggaaggccaagacaataaaggggatagcaaaaataatggcagctag

SEQ ID NO: 2012 - protein, 35 aa, Alloiococcus otitidis
MEVIANIIIYLAKAGLVIGQEEGQDNKGDSKNNGS

SEQ ID NO: 2013 - DNA, 726 bp, Alloiococcus otitidis
  CDS (67)..(723)
gaaggcatgatattttgccctaagtcctgtaaaataggtgggtattctattggaaagagtgagtgtatgtcgcgaaaaaaatccagcttttggactcccagaaacacggccctagctgccattatttttgctatcccctttattgtcttggccttcctcttggcctataaccagaccagccttagccaaatagattataatattggcaattacctccatcagttccgatctccagaccggaccaaggtcatcattggcctgaccactattggggacggctggtcgcaaacagtcctgaccctggttattagcctcctcctctttgcccttaaagaatttaaggcaggaatctggtatctcttcaccatgcttgttggggctcagttattgaactcttatgtcaaagacctttttgcaaggacccggccagactacattaaccacctggtatttgaaaattcctatgccttcccgagtggccacgccatggggaccatgatcctctttgccggcctagcctttttagtctaccgactctaccgggcccaccaccccgtctttaagggattggtagtcgtcctttgccttagcttgaccctttctattggcttaagtcggatctatttgggggtccactatccttccgatgtcctagccggttggtccttgggtgctggctttcttttcctatctatcgctgcttttggtctttgggctaccgattaa

SEQ ID NO: 2014 - protein, 219 aa, Alloiococcus otitidis
MSRKKSSFWTPRNTALAAIIFAIPFIVLAFLLAYNQTSLSQIDYNIGNYLHQFRSPDRTKVIIGLTTIGDGWSQTVLTLVISLLLFALKEFKAGIWYLFTMLVGAQLLNSYVKDLFARTRPDYINHLVFENSYAFPSGHAMGTMILFAGLAFLVYRLYRAHHPVFKGLVVVLCLSLTLSIGLSRIYLGVHYPSDVLAGWSLGAGFLFLSIAAFGLWATD

SEQ ID NO: 2015 - DNA, 726 bp, Alloiococcus otitidis; identical to SEQ ID NO: 2013
  CDS (7)..(723)

SEQ ID NO: 2016 - protein, 239 aa, Alloiococcus otitidis
MIFCPKSCKIGGYSIGKSECMSRKKSSFWTPRNTALAAIIFAIPFIVLAFLLAYNQTSLSQIDYNIGNYLHQFRSPDRTKVIIGLTTIGDGWSQTVLTLVISLLLFALKEFKAGIWYLFTMLVGAQLLNSYVKDLFARTRPDYINHLVFENSYAFPSGHAMGTMILFAGLAFLVYRLYRAHHPVFKGLVVVLCLSLTLSIGLSRIYLGVHYPSDVLAGWSLGAGFLFLSIAAFGLWATD

SEQ ID NO: 2017 - DNA, 279 bp, Alloiococcus otitidis
  CDS (52)..(276)
agttatgttatgaagcccttttcatctgctgggactccatgtatacttaacttgaaggaaaacaaaagaggtgagaggatgaaatatatctggatgatactcggctggttggcccttatagcaggtttgctaggtctgggcctgcaaaatacccaggctggttaccttgcccttattttgggcatcctatccttgttggtcaaagatatcagggggatgggcctaaccgccatttgctttggtgtggtcacctttttaatgaccaccctatttaattaa

SEQ ID NO: 2018 - protein, 75 aa, Alloiococcus otitidis
MKENKRGERMKYIWMILGWLALIAGLLGLGLQNTQAGYLALILGILSLLVKDIRGMGLTAICFGVVTFLMTTLFN

SEQ ID NO: 2019 - DNA, 279 bp, Alloiococcus otitidis; identical to SEQ ID NO: 2017
  CDS (10)..(276)

SEQ ID NO: 2020 - protein, 89 aa, Alloiococcus otitidis
MKPFSSAGTPCILNLKENKRGERMKYIWMILGWLALIAGLLGLGLQNTQAGYLALILGILSLLVKDIRGMGLTAICFGVVTFLMTTLFN

SEQ ID NO: 2021 - DNA, 768 bp, Alloiococcus otitidis
  CDS (76)..(765)
ctttataagtcagcttgcctgccttgtcctttcttagcgggccggctaggtgatacaataggaaggaggaggaagatgtccatgcaaaccctagtcattgtatcccacccagaaattgaagcttccaatagccagcagttcttaaaagaagcggtcgcaaaccaggagggggttagctaccaccacctggagtccgcctatcctgatggccagattgacattaaagctgagcagaacttgctgaaagactttgaccgaattatcttccagttccctttctattggtattccgccccttttatgctcaaaaaatggttggacgaggtgatggaagaaggggtcacctttgggacaggcggggatttactagaggggaaagacttaggcctggtccttgtgattggggtagctgaaaaagaataccaagttggcggccgggagcactttaccatcagtcaattgaccaccccctaccaggccctggcaaataagttaggcatgacctttctcacacccttgtccatcttccagttctactacttatcggataaagagcaaaaggctcttttggttaactacctccaataccttactttaaaagacttttcctcccttcgttccaggacccattggtttatggaccacttggacaaacttgagggtcaagccagtgaggaagccgacaaatttagtctccaaaccattctagattttatagaagacaaccaacttgaacttgatgaaatgcaattgcacttagacaaatag

SEQ ID NO: 2022 - protein, 230 aa, Alloiococcus otitidis
MSMQTLVIVSHPEIEASNSQQFLKEAVANQEGVSYHHLESAYPDGQIDIKAEQNLLKDFDRIIFQFPFYWYSAPFMLKKWLDEVMEEGVTFGTGGDLLEGKDLGLVLVIGVAEKEYQVGGREHFTISQLTTPYQALANKLGMTFLTPLSIFQFYYLSDKEQKALLVNYLQYLTLKDFSSLRSRTHWFMDHLDKLEGQASEEADKFSLQTILDFIEDNQLELDEMQLHLDK

SEQ ID NO: 2023 - DNA, 183 bp, Alloiococcus otitidis
  CDS (1)..(180)
atgtccgaccaagtcaactggtatttaaaccaactagatgaattaattgaaaaaagtcaagactacaaggaaaaagccatcctggaagggaccaaagacctgatccttgaccaagtccaacgccgccagcaaaatgaaggtgaattggacggttctctttggtccccaggagagtggggttaa

SEQ ID NO: 2024 - protein, 60 aa, Alloiococcus otitidis
MSDQVNWYLNQLDELIEKSQDYKEKAILEGTKDLILDQVQRRQQNEGELDGSLWSPGEWG

SEQ ID NO: 2025 - DNA, 255 bp, Alloiococcus otitidis
  CDS (7)..(252)
gtgggcttgccccaggcttcatcgaccacactggtgtcaatttccccctgggcctgcacagttaatcccgttaaggcaagaatcccagtggttagaccgaaagtggctagctttttccatttggcatccatcttgctgcctcctttactttcccttattccagcactttggctggttttcactaaaggaatcatagcaaatgccccgacttgtgaactcctgctagagactgattttttagtagaatttttttaa

SEQ ID NO: 2026 - protein, 82 aa, Alloiococcus otitidis
MPQASSTTLVSISPWACTVNPVKARIPVVRPKVASFFHLASILLPPLLSLIPALWLVFTKGIIANAPTCELLLETDFLVEFF

SEQ ID NO: 2027 - DNA, 255 bp, Alloiococcus otitidis; identical to SEQ ID NO: 2025
  CDS (1)..(252)

SEQ ID NO: 2028 - protein, 84 aa, Alloiococcus otitidis
MGLPQASSTTLVSISPWACTVNPVKARIPVVRPKVASFFHLASILLPPLLSLIPALWLVFTKGIIANAPTCELLLETDFLVEFF

SEQ ID NO: 2029 - DNA, 1926 bp, Alloiococcus otitidis
  CDS (31)..(1923)
aagaggtgtccaggtttggaacacatagatatgatgataaaagaccgcttccccactgaggctgatgtcattacggaactcatcaaccttcaggccatccagcaattgcccaaagggactgaaatgtacatcagtgatatccacggcgaatttgaatcctttgaccatattttgcggatcgggtcgggaaatgtaaaagaaaaaatcattgacctttttggccagtcttatgatgaagacaaggtcaaccaattggccctgtttgtggcctatccggaatatgccttggaccgtgtccaccaaaaagacctagaggacaaggaccaggttcggaaattaatcgaagacttgatcggggtcttgcgttttgcctcagccaagtatactcggtctaaggtacggaaggccttgccagatgcctatcgctacgtgattgaggaactcttatatgcagactatacccttccccacaagcaggcctatgcctaccaaatcatggaccagattatggccgttgggaagttggaagacttcctaaaacaattgtctttcaccattcaagacctggtcattgaccatatccatattgtgggcgatatttttgaccggggaccggatgctgacaaggtgatggatcggataatggcccttccttctgtcgatatccagtggggcaaccatgacatgatttggattggggcttacctagggtccttgccttgtcttttgaccttactccggatcgccgcccggtataattacctctttgatatcgagcggtcttatgggatcaacctccgccccttgttctcctttgctaagaaatactaccaggccaacccagtttttacccctaagggtttgaccgacaaggagaaggctgagggaacgactgagatggaacaagtccaccaggcactagccatcatccaatttaagttggaagagcaggttatccaccgccggccagaatttgacatggaccaccgtttgttactggaaaatattgacttccaaaatgagaccgtccaggttgaaggacatacttaccccatggtgggttcctgcttccaaacggttgacccggcccatcccaatgccttgattccggaagaagaggaagtggtaggggagttgatttactccttccaaaattccgaaaaaatgaaaagacatatggactttttattgagcaaggggtccaattaccttatttacaacaagcacctcctcttccatgcctgtctgcctcttgaagataatggcgacttcatggcctttaagctaggaggacagtcttttcagggccgggccttgctggactttttcgacgacaagatccaggaggcaggccaagacaaaaattcttacactgacctagcaactgacttgatttggtacctttggtgtgggcctaagtcccctctttttggcaagagtaagatgacaacctttgaaagatactttattgaagacaaggctacccacaaggaagaaaaaaatgcctacttcaagcttagggaccgaaaagaaatagtggaccaggtcttaaaagagtttggcttagaggatgacatttcggctgtcattaatggccacactccagttaaggtaagaaagggggaagaccctattaaggtggaccgtaagttgtttgttatcgacggaggcctttccaaggcttaccaagggtcgactgggattgctggttactccctcttgaataactcctttggctttcaagttgtgacccaccagaccttcacctcggtccaggacttatttaaccggggcagtgacgggtcttacgtcaaacgggtcattgaaagtgagctggaccgggtcaaaattgccgggaccaccattggcagtgacatccaaaagcaaattgacggtctccaagcccatttaaaaaaattctactaa

SEQ ID NO: 2030 - protein, 631 aa, Alloiococcus otitidis
MMIKDRFPTEADVITELINLQAIQQLPKGTEMYISDIHGEFESFDHILRIGSGNVKEKIIDLFGQSYDEDKVNQLALFVAYPEYALDRVHQKDLEDKDQVRKLIEDLIGVLRFASAKYTRSKVRKALPDAYRYVIEELLYADYTLPHKQAYAYQIMDQIMAVGKLEDFLKQLSFTIQDLVIDHIHIVGDIFDRGPDADKVMDRIMALPSVDIQWGNHDMIWIGAYLGSLPCLLTLLRIAARYNYLFDIERSYGINLRPLFSFAKKYYQANPVFTPKGLTDKEKAEGTTEMEQVHQALAIIQFKLEEQVIHRRPEFDMDHRLLLENIDFQNETVQVEGHTYPMVGSCFQTVDPAHPNALIPEEEEVVGELIYSFQNSEKMKRHMDFLLSKGSNYLIYNKHLLFHACLPLEDNGDFMAFKLGGQSFQGRALLDFFDDKIQEAGQDKNSYTDLATDLIWYLWCGPKSPLFGKSKMTTFERYFIEDKATHKEEKNAYFKLRDRKEIVDQVLKEFGLEDDISAVINGHTPVKVRKGEDPIKVDRKLFVIDGGLSKAYQGSTGIAGYSLLNNSFGFQVVTHQTFTSVQDLFNRGSDGSYVKRVIESELDRVKIAGTTIGSDIQKQIDGLQAHLKKFY

SEQ ID NO: 2031 - DNA, 1926 bp, Alloiococcus otitidis; identical to SEQ ID NO: 2029
  CDS (16)..(1923)

SEQ ID NO: 2032 - protein, 636 aa, Alloiococcus otitidis
MEHIDMMIKDRFPTEADVITELINLQAIQQLPKGTEMYISDIHGEFESFDHILRIGSGNVKEKIIDLFGQSYDEDKVNQLALFVAYPEYALDRVHQKDLEDKDQVRKLIEDLIGVLRFASAKYTRSKVRKALPDAYRYVIEELLYADYTLPHKQAYAYQIMDQIMAVGKLEDFLKQLSFTIQDLVIDHIHIVGDIFDRGPDADKVMDRIMALPSVDIQWGNHDMIWIGAYLGSLPCLLTLLRIAARYNYLFDIERSYGINLRPLFSFAKKYYQANPVFTPKGLTDKEKAEGTTEMEQVHQALAIIQFKLEEQVIHRRPEFDMDHRLLLENIDFQNETVQVEGHTYPMVGSCFQTVDPAHPNALIPEEEEVVGELIYSFQNSEKMKRHMDFLLSKGSNYLIYNKHLLFHACLPLEDNGDFMAFKLGGQSFQGRALLDFFDDKIQEAGQDKNSYTDLATDLIWYLWCGPKSPLFGKSKMTTFERYFIEDKATHKEEKNAYFKLRDRKEIVDQVLKEFGLEDDISAVINGHTPVKVRKGEDPIKVDRKLFVIDGGLSKAYQGSTGIAGYSLLNNSFGFQVVTHQTFTSVQDLFNRGSDGSYVKRVIESELDRVKIAGTTIGSDIQKQIDGLQAHLKKFY

SEQ ID NO: 2033 - DNA, 1074 bp, Alloiococcus otitidis
  CDS (121)..(1071)
aaaaattctactaaaaaatcagtctctagcaggagttcacaagtcggggcatttgctatgattcctttagtgaaaaccagccaaagtgctggaataagggaaagtaaaggaggcagcaagatggatgccaaatggaaaaagctagccactttcggtctaaccactgggattcttgccttaacgggattaactgtgcaggcccagggggaaattgacaccagtgtggtcgatgaagcctggggcaagcccacttatgtttatgggggaggcctgacttcagaccaggtggatgaaacagcagacttactggggatcgacaaccgggacaatgtcaatgaaagttcagttgaaggtcaagacctgcaaaaatacctcaagcaaggggtggggtcgacctccagtatgatttcgtcggttttggtccaacgccgggctgataataccggagtagaggtcaatattgtcaccccagacaatataacccggatttccgacctccagtatgccaatgctgccatcactgctggtgtagaggatgcccaaattatggtggcagccatccgcccagtgaccggtgaaagtgctctaaccggtgtctacaaggcttttgaactgaatggccaagacctagaaggcgaccggatggaagtggcccaggaagagttggaaacgaccgagcaaatttcaaagggcctggaccaagcagaccaggctaagttaaaccaggccatagctgatatcaagcgggacttggctgaactcaaggaccgggtggatggtcttccaagccaggaagatatccaagaaatcgtcaaccaagccttggccaaccataatttaagccaagttgtcagtccagaacaagtggaccaattaattgtcttgtttgtcaaataccaagaaacctcggccattgattccgaccaagtcctccagcaactagaacgttacagtcaggatttgaaagccaaggccggcgacctcattgaagaagctgaaaaccgaggcatttttgatgccatcagagactttttcagacaattgtggcaggccttgctggacctctttaattaa

SEQ ID NO: 2034 - protein, 317 aa, Alloiococcus otitidis
MDAKWKKLATFGLTTGILALTGLTVQAQGEIDTSVVDEAWGKPTYVYGGGLTSDQVDETADLLGIDNRDNVNESSVEGQDLQKYLKQGVGSTSSMISSVLVQRRADNTGVEVNIVTPDNITRISDLQYANAAITAGVEDAQIMVAAIRPVTGESALTGVYKAFELNGQDLEGDRMEVAQEELETTEQISKGLDQADQAKLNQAIADIKRDLAELKDRVDGLPSQEDIQEIVNQALANHNLSQVVSPEQVDQLIVLFVKYQETSAIDSDQVLQQLERYSQDLKAKAGDLIEEAENRGIFDAIRDFFRQLWQALLDLFN

SEQ ID NO: 2035 - DNA, 1074 bp, Alloiococcus otitidis; identical to SEQ ID NO: 2033
  CDS (58)..(1071)

SEQ ID NO: 2036 - protein, 338 aa, Alloiococcus otitidis
MIPLVKTSQSAGIRESKGGSKMDAKWKKLATFGLTTGILALTGLTVQAQGEIDTSVVDEAWGKPTYVYGGGLTSDQVDETADLLGIDNRDNVNESSVEGQDLQKYLKQGVGSTSSMISSVLVQRRADNTGVEVNIVTPDNITRISDLQYANAAITAGVEDAQIMVAAIRPVTGESALTGVYKAFELNGQDLEGDRMEVAQEELETTEQISKGLDQADQAKLNQAIADIKRDLAELKDRVDGLPSQEDIQEIVNQALANHNLSQVVSPEQVDQLIVLFVKYQETSAIDSDQVLQQLERYSQDLKAKAGDLIEEAENRGIFDAIRDFFRQLWQALLDLFN

SEQ ID NO: 2037 - DNA, 1254 bp, Alloiococcus otitidis
  CDS (31)..(1251)
acatggacgaaatcaactaggaggaatagcatgactcaaaagaataaaagcaaatatgaccccttgttccgagccattgaactcccaaatggcatcaagttagccaatcgtttttcccttaaccctatcaccaccaatgcctcttccaaagaaggctatgtgacggaggaagaaactgcctatgccaaacgccgcagcaagtcagcccctctccaagtgaccacagcagcctatgtcgaagactatgcccagctcttcgaatacggccccagtgtccgggacgactcctttgtttacggcctgtccaaactggccgaagccatgaagcaagacggggccaaggccatcttgcaattaacccatgccggccgctttgccaaaatcgccttaaaagactatggtgtggtctacgggcccagctacatgcatttaaaaactccagttgaacacgatgttttagccatgtctaagcggaagattgaccatgtcattaaccagtatgctcaagcaacaagacgggcaattgaagcaggctttgatggggtagaaatttccaacgcccaacgcctcctcccccaacaattcttctccaagttctccaaccaacgggacgacgaatacggcccccaatctgttgagaaccgggcccggtttggggtggaagtcatggaggccgtccagaaggtcattgaccagtctggtaagaaagactttatactgggtttccggggcacaccagaggaaacccggggcaatcaaattggctatacggtggacgaattcaaccaatattttgacctcatgcaggaagtctcaactatccactactatgccatcgcctcatggggccatgacatttatctcaacaaggttcgggccgaccagcaccagggccaatacgtcaacaaggtcgtccacgactatataggcggccgggtacccgttattgccactggcggcattaacaccccagacaaggccctccaagccttggaaaatgctgatatggttggcctatcgtcagcctttgtcactgaacccgacttcgtcaacaagctagaagctggccaagaagaaagcattgacctgagccttgaccttgacaagttggatgacttggctattccccacaaggccttcaaagacctggtagaatttatggactttggtgggtcgctgccagaagaaagtcggaacaagctccgggacctagccgaccaagaccccacctcctactttaaagaatttaaataa

SEQ ID NO: 2038 - protein, 407 aa, Alloiococcus otitidis
MTQKNKSKYDPLFRAIELPNGIKLANRFSLNPITTNASSKEGYVTEEETAYAKRRSKSAPLQVTTAAYVEDYAQLFEYGPSVRDDSFVYGLSKLAEAMKQDGAKAILQLTHAGRFAKIALKDYGVVYGPSYMHLKTPVEHDVLAMSKRKIDHVINQYAQATRRAIEAGFDGVEISNAQRLLPQQFFSKFSNQRDDEYGPQSVENRARFGVEVMEAVQKVIDQSGKKDFILGFRGTPEETRGNQIGYTVDEFNQYFDLMQEVSTIHYYAIASWGHDIYLNKVRADQHQGQYVNKVVHDYIGGRVPVIATGGINTPDKALQALENADMVGLSSAFVTEPDFVNKLEAGQEESIDLSLDLDKLDDLAIPHKAFKDLVEFMDFGGSLPEESRNKLRDLADQDPTSYFKEFK

SEQ ID NO: 2039 - DNA, 117 bp, Alloiococcus otitidis
  CDS (1)..(114)
atgtttgatattgagcaattagatcaacaagaacaatacggagcagttgctaccactgctttactgattgctggtggttttttaactggtggcggattagcatggatagctaactag

SEQ ID NO: 2040 - protein, 38 aa, Alloiococcus otitidis
MFDIEQLDQQEQYGAVATTALLIAGGFLTGGGLAWIAN

SEQ ID NO: 2041 - DNA, 1173 bp, Alloiococcus otitidis
  CDS (460)..(1170)
ggagatggaatactggataatcaagtatttaatcagttaaggaagctagaaattaccgggccctttcaaaaagagaatatagaaaagaaatattacatattaaaaaatgttgagacaaatttgttttttgaacttggagaaaaagaggctatattgttgaaattgcttcaggacaatgaaataaaaaaagcaaaagaattttctgtcacaaattttggacaaaatgtagtggatcaatttatcaaggaattatataagaataacatcctacaaagggggtccaagcccacaactccgagtcaaagtaatgatattgaatgtgtattaccgtttatatcatatataattaataatatacctataaaaaatacctactcattaataatatattatgtcttaattattgtattttctggtgggggtttaatagcgtttggaagtagtttaaataaattcgaaatgaatgctagtaaagtcaacggattaaacttgatagtgttattggtactttttcttgtaacaatatttatacatgaactgggacatgcaattaggctgagattagcggataaaagtattggtgatattaagttattcgctaatttttatccaataaagttaggcatgcaaattgacacttctgaatcgtatatgttggaaagaaaaaaagacaaaatttctgtggctttgggtggagtatatgcccagctagcttttaatggaatagttgcattagttctttatatgatgaatgtagaagtttttgatactacatttatatttgttttatatactgtaggtaattggattattattatttcgaatttaattccctttatgaaattggatggatattggattttatcacattatcttggtatcaataatttaagtgacaaatctgtaaacatgttaaaagattttataagaataaattttcttggtgctagagaaccaatatatcgtaattatcaagatgagggaatggaaagacataaattcttttatagtacatatggatttttgtatttaattttcaacccagtaagtagtttagctttgttgggattattagtctatattagtgatagtattgtaatcttcattatattgtgtgttggtatagtaagggttatttatatgggcataaaatttatatataaattaatataa

SEQ ID NO: 2042 - protein, 237 aa, Alloiococcus otitidis
MNASKVNGLNLIVLLVLFLVTIFIHELGHAIRLRLADKSIGDIKLFANFYPIKLGMQIDTSESYMLERKKDKISVALGGVYAQLAFNGIVALVLYMMNVEVFDTTFIFVLYTVGNWIIIISNLIPFMKLDGYWILSHYLGINNLSDKSVNMLKDFIRINFLGAREPIYRNYQDEGMERHKFFYSTYGFLYLIFNPVSSLALLGLLVYISDSIVIFIILCVGIVRVIYMGIKFIYKLI

SEQ ID NO: 2043 - DNA, 1173 bp, Alloiococcus otitidis; identical to SEQ ID NO: 2041
  CDS (229)..(1170)

SEQ ID NO: 2044 - protein, 314 aa, Alloiococcus otitidis
MDQFIKELYKNNILQRGSKPTTPSQSNDIECVLPFISYIINNIPIKNTYSLIIYYVLIIVFSGGGLIAFGSSLNKFEMNASKVNGLNLIVLLVLFLVTIFIHELGHAIRLRLADKSIGDIKLFANFYPIKLGMQIDTSESYMLERKKDKISVALGGVYAQLAFNGIVALVLYMMNVEVFDTTFIFVLYTVGNWIIIISNLIPFMKLDGYWILSHYLGINNLSDKSVNMLKDFIRINFLGAREPIYRNYQDEGMERHKFFYSTYGFLYLIFNPVSSLALLGLLVYISDSIVIFIILCVGIVRVIYMGIKFIYKLI

SEQ ID NO: 2045 - DNA, 1173 bp, Alloiococcus otitidis; identical to SEQ ID NO: 2041
  CDS (121)..(1170)

SEQ ID NO: 2046 - protein, 350 aa, Alloiococcus otitidis
MFFELGEKEAILLKLLQDNEIKKAKEFSVTNFGQNVVDQFIKELYKNNILQRGSKPTTPSQSNDIECVLPFISYIINNIPIKNTYSLIIYYVLIIVFSGGGLIAFGSSLNKFEMNASKVNGLNLIVLLVLFLVTIFIHELGHAIRLRLADKSIGDIKLFANFYPIKLGMQIDTSESYMLERKKDKISVALGGVYAQLAFNGIVALVLYMMNVEVFDTTFIFVLYTVGNWIIIISNLIPFMKLDGYWILSHYLGINNLSDKSVNMLKDFIRINFLGAREPIYRNYQDEGMERHKFFYSTYGFLYLIFNPVSSLALLGLLVYISDSIVIFIILCVGIVRVIYMGIKFIYKLI

SEQ ID NO: 2047 - DNA, 747 bp, Alloiococcus otitidis
  CDS (31)..(744)
attaatataattaggaatggagatgggcaattgagttatatagaagttgattctataacaaaaaaatattcagatgtaattgctttgaataatgtatcattttcgattcaaaagggggaattattttgtttgcttggtgagaatggagctggaaaaacaacacttataagaattttatcaacactagttaagccaactgatgggaaagtttttattaaaaaccaaaaaaatatatataacaataggcttatcaaaaggtatttagggactgtcacggatagtgcaaaaccctatcctaacttgacagtgaaagaaaatattgattttttttcactaatgtattccaacaatgctggagttaaaaatgatcgtactgaagcattaattaatctacttgaattggaggagtataccgacaaaaaagtagatttattgagtaaggggaataagcaaaaagtggccatagccaaagctttatgtggtgaacctgagatattaatatttgatgaacccatgagtggattggatgtgggtacccagaagactattagaggcttaatgtctaggcttcaaaaaaatgggaaaacaataatattttcttctcataatatggaggaagtcagaaaaatagcagatagaatttgtattctcaataaaggtagcattgtctacgatggttatttaagtgatataaaaaatgaagagcgggtgacttatttagaaaatatgttaacaagaaaggattga

SEQ ID NO: 2048 - protein, 238 aa, Alloiococcus otitidis
MSYIEVDSITKKYSDVIALNNVSFSIQKGELFCLLGENGAGKTTLIRILSTLVKPTDGKVFIKNQKNIYNNRLIKRYLGTVTDSAKPYPNLTVKENIDFFSLMYSNNAGVKNDRTEALINLLELEEYTDKKVDLLSKGNKQKVAIAKALCGEPEILIFDEPMSGLDVGTQKTIRGLMSRLQKNGKTIIFSSHNMEEVRKIADRICILNKGSIVYDGYLSDIKNEERVTYLENMLTRKD

SEQ ID NO: 2049 - DNA, 1164 bp, Alloiococcus otitidis
  CDS (652)..(1161)
agagcgggtgacttatttagaaaatatgttaacaagaaaggattgaattttttgttattactgaagactttatttaaaaaagagatgatgcagtattttaggaattggaaatcatggggggtaatgttacttctacctttagtttttataccagcagcaattatagcacccatgcttatatctaataatagggctgagaacgtatataatatttattttgaagaaaatataaatgaaaaagacagtattcttgaggagttaattcaaaagaacgacaactttactatcgtcagtgatgaagaaaattttgatctgaaaatttctaagttagatcaaaatgaaataaatgttgagtataaaagcgatgaaaatgattcaaatgaagctttattggcgctgaataccttattgatgtcattatcaaatcaaaaaatggctcaagaactggaaatgaataatattgattcaagtagttataatataaatttaaatgtaactgatattgcagaagtaaagggaagtcaaggagatcaatttattgcttttatgctaccacttgtactttcattaatgattgcaatgggcccacttgctcatggggctagtgtagtagctggagagaaagaaaagggtacaattgaatcctcattaatgctacctgttaaaagagtggtattattattagtgaagtttgctagtgtctttttatcgagtatcttcatgacaattgccactttaattggaattacaggagctgtattggccgttaataagcttaccgatataagtataaacctatattcggaacattatttatatatgattttaataggcatagtaggttctctactattttcttcaatttatattggaattagtattatcgcaaagggaactgaagaggcaaacaactatgtaacgattgtaagtttagtagctgcttctctgatggtagtaggaggaatgacgttagaaaaaccaggaatatattatactccttttgtaaatatgcatgcaattttgtctgatgcttttactttgggtgagaatgttgcaatggttcatattggtttggtaatattgaccaatttaatctttacaattatatgcctaattgtagatgagtttctattaaatagggaagatgttgtacttggtaaatag

SEQ ID NO: 2050 - protein, 170 aa, Alloiococcus otitidis
MLPVKRVVLLLVKFASVFLSSIFMTIATLIGITGAVLAVNKLTDISINLYSEHYLYMILIGIVGSLLFSSIYIGISIIAKGTEEANNYVTIVSLVAASLMVVGGMTLEKPGIYYTPFVNMHAILSDAFTLGENVAMVHIGLVILTNLIFTIICLIVDEFLLNREDVVLGK

SEQ ID NO: 2051 - DNA, 1164 bp, Alloiococcus otitidis; identical to SEQ ID NO: 2049
  CDS (172)..(1161)

SEQ ID NO: 2052 - protein, 330 aa, Alloiococcus otitidis
MLISNNRAENVYNIYFEENINEKDSILEELIQKNDNFTIVSDEENFDLKISKLDQNEINVEYKSDENDSNEALLALNTLLMSLSNQKMAQELEMNNIDSSSYNINLNVTDIAEVKGSQGDQFIAFMLPLVLSLMIAMGPLAHGASVVAGEKEKGTIESSLMLPVKRVVLLLVKFASVFLSSIFMTIATLIGITGAVLAVNKLTDISINLYSEHYLYMILIGIVGSLLFSSIYIGISIIAKGTEEANNYVTIVSLVAASLMVVGGMTLEKPGIYYTPFVNMHAILSDAFTLGENVAMVHIGLVILTNLIFTIICLIVDEFLLNREDVVLGK

SEQ ID NO: 2053 - DNA, 1164 bp, Alloiococcus otitidis; identical to SEQ ID NO: 2049
  CDS (85)..(1161)

SEQ ID NO: 2054 - protein, 359 aa, Alloiococcus otitidis
MMQYFRNWKSWGVMLLLPLVFIPAAIIAPMLISNNRAENVYNIYFEENINEKDSILEELIQKNDNFTIVSDEENFDLKISKLDQNEINVEYKSDENDSNEALLALNTLLMSLSNQKMAQELEMNNIDSSSYNINLNVTDIAEVKGSQGDQFIAFMLPLVLSLMIAMGPLAHGASVVAGEKEKGTIESSLMLPVKRVVLLLVKFASVFLSSIFMTIATLIGITGAVLAVNKLTDISINLYSEHYLYMILIGIVGSLLFSSIYIGISIIAKGTEEANNYVTIVSLVAASLMVVGGMTLEKPGIYYTPFVNMHAILSDAFTLGENVAMVHIGLVILTNLIFTIICLIVDEFLLNREDVVLGK

SEQ ID NO: 2055 - DNA, 1164 bp, Alloiococcus otitidis; identical to SEQ ID NO: 2049
  CDS (43)..(1161)

SEQ ID NO: 2056 - protein, 373 aa, Alloiococcus otitidis
MNFLLLLKTLFKKEMMQYFRNWKSWGVMLLLPLVFIPAAIIAPMLISNNRAENVYNIYFEENINEKDSILEELIQKNDNFTIVSDEENFDLKISKLDQNEINVEYKSDENDSNEALLALNTLLMSLSNQKMAQELEMNNIDSSSYNINLNVTDIAEVKGSQGDQFIAFMLPLVLSLMIAMGPLAHGASVVAGEKEKGTIESSLMLPVKRVVLLLVKFASVFLSSIFMTIATLIGITGAVLAVNKLTDISINLYSEHYLYMILIGIVGSLLFSSIYIGISIIAKGTEEANNYVTIVSLVAASLMVVGGMTLEKPGIYYTPFVNMHAILSDAFTLGENVAMVHIGLVILTNLIFTIICLIVDEFLLNREDVVLGK

SEQ ID NO: 2057 - DNA, 831 bp, Alloiococcus otitidis
  CDS (25)..(828)
tactatctgttaaggagcgaaatgatggaagatgctgtcctagctgataaattagatggtctaatcgccactttagctaaagaaaatccggtcttagagtccaagttctcaacctaccctcaccgggacttggacgacaaatttcaactttaccgggctttttgcaatgaacgccagcccagaccggtcagtgaccaatttgtccaagaagaagccgaggttctaaaagaagtggctaagcgtaagggcaaggttagcctagaagatataaaacaagcaggtggccaactagatgaccaagtctatttatggcagggggatattacccgcctagccttagatgggatcgtcaatgcggccaacagctatcttttgggttgtaccctggccaaccacaactgtattgataatgccatccatacccaggcaggagtccggctcagactggcctgctatgacttgatgctagaccaaggacgcaaggaagcagcaggcaaggccaagatcaccccagcttttaacctgcccagtaaggctgtcctccacacagtaggcccttatattgaccaaaggggagttacacccttaaaagaaagactcttagccagttcttaccggacttgcctccaagtggctgaggccaaccagctgaaagaactggccttctgctcgatttcaaccggggaattcaactaccccaaagaccaggctgcccagctagccagccaggtggtcaaggattacttggctgaaagtgctagtgagataaatattgtattcaacgtctttcaagatgaagatgccaagctctaccgtgatatttggcaataa

SEQ ID NO: 2058 - protein, 268 aa, Alloiococcus otitidis
MEDAVLADKLDGLIATLAKENPVLESKFSTYPHRDLDDKFQLYRAFCNERQPRPVSDQFVQEEAEVLKEVAKRKGKVSLEDIKQAGGQLDDQVYLWQGDITRLALDGIVNAANSYLLGCTLANHNCIDNAIHTQAGVRLRLACYDLMLDQGRKEAAGKAKITPAFNLPSKAVLHTVGPYIDQRGVTPLKERLLASSYRTCLQVAEANQLKELAFCSISTGEFNYPKDQAAQLASQVVKDYLAESASEINIVFNVFQDEDAKLYRDIWQ

SEQ ID NO: 2059 - DNA, 831 bp, Alloiococcus otitidis; identical to SEQ ID NO: 2057
  CDS (22)..(828)

SEQ ID NO: 2060 - protein, 269 aa, Alloiococcus otitidis
MMEDAVLADKLDGLIATLAKENPVLESKFSTYPHRDLDDKFQLYRAFCNERQPRPVSDQFVQEEAEVLKEVAKRKGKVSLEDIKQAGGQLDDQVYLWQGDITRLALDGIVNAANSYLLGCTLANHNCIDNAIHTQAGVRLRLACYDLMLDQGRKEAAGKAKITPAFNLPSKAVLHTVGPYIDQRGVTPLKERLLASSYRTCLQVAEANQLKELAFCSISTGEFNYPKDQAAQLASQVVKDYLAESASEINIVFNVFQDEDAKLYRDIWQ

SEQ ID NO: 2061 - DNA, 963 bp, Alloiococcus otitidis
  CDS (79)..(960)
atattgtattcaacgtctttcaagatgaagatgccaagctctaccgtgatatttggcaataaagtgaacaaagaggagatggaccaagtgacggaaacaggtatttggacaggtttagaccaggcgagtagccaggccagccaattaggccagctaattgaccaggcagatgctatcctggtcggagctggcgctggcttgtcagcggctgccggctttacctattcgggcgaccgctttagccaggcctttcccgattttatcgccaagtataactattttgacatgctccaggccttccttgatgactatgaagacttgagggaatattgggcctttcaaagtcgctttgccttgctcaattattttgaccaggcagttggtcaggcctatttagatttaaaagacatcttagaagagaaagactaccatgtgctgaccaccaatgctgacaatgcctttgaggcaggaggttttgatatggacaaggttttccgcatccagggggaatacggcttgtggcagtgcagtcgtttttgccaccaacagacctaccaggatgaggccttgacccggcaaatggtggaccaacaagaagacatgaaggtgccagaagacctcattccttactgccctaaatgtggggctcctttggaagtcaacaaacgggatgcagtccacggcatggtggaagactcaaactggcaccagcaggaagagcgttaccgtgcctttttgaagggccaccaggaggggaaaatattatacttagagatcggcgtaggggtcactacacctcaatttatccgggaacccttccaagatttgaccagccagaacccccaagccctttatgtgaccatgaaccagagaccctaccggataggtcaaaaagtcaaggggcaggctgtccggattaccgatgatattagtcaagtcttgcacacgatttccaatagatag

SEQ ID NO: 2062 - protein, 294 aa, Alloiococcus otitidis
MDQVTETGIWTGLDQASSQASQLGQLIDQADAILVGAGAGLSAAAGFTYSGDRFSQAFPDFIAKYNYFDMLQAFLDDYEDLREYWAFQSRFALLNYFDQAVGQAYLDLKDILEEKDYHVLTTNADNAFEAGGFDMDKVFRIQGEYGLWQCSRFCHQQTYQDEALTRQMVDQQEDMKVPEDLIPYCPKCGAPLEVNKRDAVHGMVEDSNWHQQEERYRAFLKGHQEGKILYLEIGVGVTTPQFIREPFQDLTSQNPQALYVTMNQRPYRIGQKVKGQAVRITDDISQVLHTISNR

SEQ ID NO: 2063 - DNA, 963 bp, Alloiococcus otitidis; identical to SEQ ID NO: 2061
  CDS (25)..(960)

SEQ ID NO: 2064 - protein, 312 aa, Alloiococcus otitidis
MKMPSSTVIFGNKVNKEEMDQVTETGIWTGLDQASSQASQLGQLIDQADAILVGAGAGLSAAAGFTYSGDRFSQAFPDFIAKYNYFDMLQAFLDDYEDLREYWAFQSRFALLNYFDQAVGQAYLDLKDILEEKDYHVLTTNADNAFEAGGFDMDKVFRIQGEYGLWQCSRFCHQQTYQDEALTRQMVDQQEDMKVPEDLIPYCPKCGAPLEVNKRDAVHGMVEDSNWHQQEERYRAFLKGHQEGKILYLEIGVGVTTPQFIREPFQDLTSQNPQALYVTMNQRPYRIGQKVKGQAVRITDDISQVLHTISNR

SEQ ID NO: 2065 - DNA, 963 bp, Alloiococcus otitidis; identical to SEQ ID NO: 2061
  CDS (4)..(960)

SEQ ID NO: 2066 - protein, 319 aa, Alloiococcus otitidis
MYSTSFKMKMPSSTVIFGNKVNKEEMDQVTETGIWTGLDQASSQASQLGQLIDQADAILVGAGAGLSAAAGFTYSGDRFSQAFPDFIAKYNYFDMLQAFLDDYEDLREYWAFQSRFALLNYFDQAVGQAYLDLKDILEEKDYHVLTTNADNAFEAGGFDMDKVFRIQGEYGLWQCSRFCHQQTYQDEALTRQMVDQQEDMKVPEDLIPYCPKCGAPLEVNKRDAVHGMVEDSNWHQQEERYRAFLKGHQEGKILYLEIGVGVTTPQFIREPFQDLTSQNPQALYVTMNQRPYRIGQKVKGQAVRITDDISQVLHTISNR

SEQ ID NO: 2067 - DNA, 1050 bp, Alloiococcus otitidis
  CDS (1)..(1047)
atgtatttaattgaaccaatccgcaatggggaatgggtttatgaccaaggcacggccatggcgatccaggcttacatccgggatgaagttttcttaggggaggacatcatcttcccttacctggtcaacccttccatccagcttggtgtcaaccaaaatgcctatgaagagattaaccagccctttatggacgaaaacgatatcggactggtcagacgagacactggtggcggcgccatttacctagatgaccggaatatgagttattgctacttgattagtacagataatgctaatgatgtttacggcaacttcaaaaaattgtatgaccccattatccgggtattaaaaaacatgggtgtggaaggcctagaacaaaaaggccgaaatgacttaaccttaaatggccggaaaatttctggcgctgccatgactgtggtccacggccggatttatgcgggttattcgcttttgattgaccccaattatgaggtgatggacattgcccttaaccccaacagtaaaaagatttcttcccatggagttaagtcagtccggtcccgggtcggcacccttcgtgatgcgctggatgacaagtacaaggatattaccgtttgggaattttccgatgaaatcctcaaggaactcttggacgttgacgacttggaccaggccaaacgctatgaactgaccgaagaggactgggcggccattgataaaatagctgctgaccactacaacaactgggattggaactacggccacttccgggagttcgagtaccaggtggatgaacgctttgaaggggtcgggaccctccacatcggtttagaaattaaacatgctcgaattgacgatatccagattaacggggactttttcagtgtggaacccaaggaagacttggaagcaatcttcaagggtgttcgcctagacaagactgccctccaccaagttctcgatgaagtagatgttagccagtatatcaataatatggaccaagacaccttgataaactttattttagaaatcccacaagataaggactaa

SEQ ID NO: 2068 - protein, 349 aa, Alloiococcus otitidis
MYLIEPIRNGEWVYDQGTAMAIQAYIRDEVFLGEDIIFPYLVNPSIQLGVNQNAYEEINQPFMDENDIGLVRRDTGGGAIYLDDRNMSYCYLISTDNANDVYGNFKKLYDPIIRVLKNMGVEGLEQKGRNDLTLNGRKISGAAMTVVHGRIYAGYSLLIDPNYEVMDIALNPNSKKISSHGVKSVRSRVGTLRDALDDKYKDITVWEFSDEILKELLDVDDLDQAKRYELTEEDWAAIDKIAADHYNNWDWNYGHFREFEYQVDERFEGVGTLHIGLEIKHARIDDIQINGDFFSVEPKEDLEAIFKGVRLDKTALHQVLDEVDVSQYINNMDQDTLINFILEIPQDKD

SEQ ID NO: 2069 - DNA, 1017 bp, Alloiococcus otitidis
  CDS (10)..(1014)
gaggatcgtatggttgacttaggtatcttagactatgcacaaatcaatgaagggaaaaatcccagccaggccttggaagagacggtcagcctggcccaatacagtgaagaattaggctacaaacgcttctgggtggctgaacaccacaatgttcccgcctttgcttcctcctctccggaagtgattatgatgcatctcttggacaagactaaggaaatccggatcgggtcaggtggggttatgttgccccactactccccgcttaaggtagctgaaaactttaagatcttagaagcctttcacccaggccgggttgatcttggagttgggaatacagaagggacaaaaccagtatatgatgccttaaatgaacggaaaacggtcgactttgattatgaagcagccatcaaagatattcaaggttacttgactagcctaccggaagaccaccgacacaaacgggtcactgctaaccccaatatcgaccgggcaccccaaatgtgggtcctttcttccagtgtcaaaagtgctcggatggcggcccggctcggcctaggctatgcatttggcattttcccttatccaagaaataaccggatggaagtcggcaaggaagcttgccaggtttaccgggaagagttccaaccttcagccttcctcaaagaacccaaagtaacggtcgctcccttcctaacagtggcagaagaccaggccttggccttagcctatgcggaagccttggacttgtggttgcttggtaaggacaattttggtgacctagaccacttcccttcagtggaaacagcccgccaatatgactactctaaaggagaagccaagattgtagaacggaaccggacccggatggtagttggggaggttaatgaagtagccgaccagctccaagacatcgcccagaccatgcaggcagatgaactcctcttaatcccccttatgccatctatcgaagctcggaaagaagcccttaaactcttagctgataaatttatttcttaa

SEQ ID NO: 2070 - protein, 335 aa, Alloiococcus otitidis
MVDLGILDYAQINEGKNPSQALEETVSLAQYSEELGYKRFWVAEHHNVPAFASSSPEVIMMHLLDKTKEIRIGSGGVMLPHYSPLKVAENFKILEAFHPGRVDLGVGNTEGTKPVYDALNERKTVDFDYEAAIKDIQGYLTSLPEDHRHKRVTANPNIDRAPQMWVLSSSVKSARMAARLGLGYAFGIFPYPRNNRMEVGKEACQVYREEFQPSAFLKEPKVTVAPFLTVAEDQALALAYAEALDLWLLGKDNFGDLDHFPSVETARQYDYSKGEAKIVERNRTRMVVGEVNEVADQLQDIAQTMQADELLLIPLMPSIEARKEALKLLADKFIS

SEQ ID NO: 2071 - DNA, 1269 bp, Alloiococcus otitidis
  CDS (1)..(1266)
atgaatattatcgatgaactagaatggcggggagccattaaccaacaaacggatgcagaaggcttaagagaattggtcgaaaaccagtccatcgccctctactgtggggtggacccaactggcgacagtatgcatatcggccacctcatcccctttatcatccttaaacgtttccaaaaagctggccacaaaccagttgtcttaattggtggcggaacaggatccattggcgaccccagtggcaaaaagtcggaacgccaactccaaagtaaagaccaagtccaacataatgttgaaaaactcagcgggcaaatgaaagacctctttcaagctggccaggaccaatctggtatccggttggctaacaatgccgattggttgggacccttgtctttcttagactttttaagggactacggaaaagaatttaacatcaacaccatgctagcgaaagatattgtagctaaccgtttggaagccggcatttctttcgccgaatttagctaccaaatcatccagtccattgacttcctccacctctaccaacatgaaggagtccaattgcaagtaggaggagccgaccaatggggcaatatcacagctggtcttgaccttatccgtaaaaaagaagggccagatgccaaggcctttggtttgacgatccccttattgctcaaggctgacgggaccaagtttgggaaaactgaaggcggggctgtttggttagacccggacaagaccagcccttatgaattctaccaattctggctcaaccaacgagacgaggatgttatcaaatacttgaaatactttaccttctttaaccaggaagaaattcaagaactccaagaaagtttagaaaaagaaccccacttacgcaaggcccaaaaagccttggctgaagacatgacccggtttgtccacggcgaccaagcccttgaagaagcccaagaaattagccaggccctcttctcaggcgacattgccgacttatcggccgaccaggtagctagcggtttacaagacgtgccgacctcaacagcaccgagaggagaacatgacatcgttgaattcttagttgacatcaccggtattgtccaatcccgccgccaagcccgggaattcctggacaatggggccattaccatcaagggccagcgcatccaggatagaaattacactattagtcaggcagattctttcgacaaccgttttattgtggtccgccgtggtaagaaaaaatacttcatcgtcaacctaactaactaa

SEQ ID NO: 2072 - protein, 422 aa, Alloiococcus otitidis
MNIIDELEWRGAINQQTDAEGLRELVENQSIALYCGVDPTGDSMHIGHLIPFIILKRFQKAGHKPVVLIGGGTGSIGDPSGKKSERQLQSKDQVQHNVEKLSGQMKDLFQAGQDQSGIRLANNADWLGPLSFLDFLRDYGKEFNINTMLAKDIVANRLEAGISFAEFSYQIIQSIDFLHLYQHEGVQLQVGGADQWGNITAGLDLIRKKEGPDAKAFGLTIPLLLKADGTKFGKTEGGAVWLDPDKTSPYEFYQFWLNQRDEDVIKYLKYFTFFNQEEIQELQESLEKEPHLRKAQKALAEDMTRFVHGDQALEEAQEISQALFSGDIADLSADQVASGLQDVPTSTAPRGEHDIVEFLVDITGIVQSRRQAREFLDNGAITIKGQRIQDRNYTISQADSFDNRFIVVRRGKKKYFIVNLTN

SEQ ID NO: 2073 - DNA, 921 bp, Alloiococcus otitidis
  CDS (61)..(918)
gggcttattcgtgagatattttacataaaattaacctataagttaagcgagtatagtagaatgaaagggagactgataaagggtgtggatggattggagaaaattgtcttttttgatgtagatggaaccttactggccaaaaatgggaaaataccctcttcgacccaacaagccattgctaagctaaaagaggagggggtcttgccggtgattgcaacaggccggtctcctttattgcttgaaggggtggcccaagtcttggacatcgacagctatattgccatgaatggccaatatattgtcttggaaggggaacttttttatcacaaccccatagctcctgacctattagaccgctttacccaatatgctaaggaggcgggtgacggctatgtgctctgcggcagtgacgaaatctatactgggacctccatggacaaggaaagcaagcgttaccgctttttgaaatacttggctagcattgtcccccaaaacctgcagctgtcctttatgaagcgggccatgaaaaagtacccggatcccttagcctaccaggataagcctgtctaccaggctatattgcaggccccagcaaactcagaaattaattatatcgaaaattttcccggcctccgctttacccggtctaaccccatcatgtttgacgtgatcaagaacgggacttccaaagcaaccggaatccaacgtattgctgaccactaccaggtggacttagaccaaacctatgctttcggggaccacttaaatgatattgaaatgctacaattggtgggtcatggggtggccatggggaatgccttagacgaggtcaagtcgatttcagaccgggtcaccctggaagtggaccagggtgggatctaccatggcttgttggacttgggtattattgacccgctttag

SEQ ID NO: 2074 - protein, 286 aa, Alloiococcus otitidis
MKGRLIKGVDGLEKIVFFDVDGTLLAKNGKIPSSTQQAIAKLKEEGVLPVIATGRSPLLLEGVAQVLDIDSYIAMNGQYIVLEGELFYHNPIAPDLLDRFTQYAKEAGDGYVLCGSDEIYTGTSMDKESKRYRFLKYLASIVPQNLQLSFMKRAMKKYPDPLAYQDKPVYQAILQAPANSEINYIENFPGLRFTRSNPIMFDVIKNGTSKATGIQRIADHYQVDLDQTYAFGDHLNDIEMLQLVGHGVAMGNALDEVKSISDRVTLEVDQGGIYHGLLDLGIIDPL

SEQ ID NO: 2075 - DNA, 2082 bp, Alloiococcus otitidis
  CDS (265)..(2079)
acctgttataggttcaatattctgaaggaggcggctcatttgtcagctgaaaatagtttttatataacaactccaattttttatccgagtggtaacctgcatatcgggaatacatataccactgtggcttgtgatgttattagccggtataaaagattgcaaggatttgacacccactttttaacaggaacagacgaacacggtcaaaaaattgaacagaaggccgaagaaagcggtaaaaccccccaggaatatgtcgatgagatggcagactatatccaaaatctctggtcctacctccacatctccaatgaccaatttatccggactacagatgattaccacaaaaaaatcgttgccaagatcttcgacaagttatatgagcagggggatatctaccttggagagtatgctggttggtattccgtatccgatgaagaatactttaccgaaaaccagctagaagaagtctacaaggatgaccaaggcaaggtcattggaggtaaggctccaagtggccacgaagttgaatgggttaaggaagaatcttacttctttaaaatgagcaagtacagtgaccgcttgctccaatactatgaagacaatcctggctttatccaacctgaaagccggaaaaaagaaatgatcaacaactttatcaaacctggactagaagacctagctgttacccggactacctttgactgggggattccggttaatgctgaccccaaacacgtggtctacgtttggatcgatgccttgtctaactatattacagcactaggctatgatccagaccttggtggctttgaccagcaaccagaccagtttaaaaaatactggccagcagacatccacatggtaggcaaagagattgtccgcttccacaccatttattggccgattatgctcatggccctggacctacctcttcctaagcgaatatatggccacggttggttactgatgaaagatggtaaaatgtccaagtctaaaggtaatgtcgtctatcctgaattcttggttgacgaatacggcttagatcccttgcgctactactttgtccgcgaagttcctttcggtagtgacggggtctttacaccagaagactttatcaaccggattaactatgacctggctaacgaccttggcaacctggttaaccggacagtttcgatgattaacaaatactttgacggtaaggtaccagcttatgttggcccagtaactgactatgatgaaccactggccaaactggctgaagaaaccatccaggattataagaaaaaaatggatgacctccaatttaaccgggccgtttcatcggtatggaacttgatctctcgcaccaacaagtacattgaccaaaccgaaccatggctattggctaaagatgaatccaaacagaaagaacttgcttcagtcatgacccacctagtcctgtcactgagagtggtggctaacttgctccaacctattttaattgaaagctccggtaaaattttagaccagttgggcctaagtaaactaggggaacaagactggaaggacctccactttgatgtcgacctagctggtgtccaagttgcttcaaaaggtcagccaatcttcccacgacttgacttggaccaagaagtggctaagatcaaaaaggccatggaagagggcaagggcaagtctaaggctggtgaagaagataaagaccaatgggaaccggaaaaaatccctctcagcttggaccgggatgaaatcgacttcgaccaatttatgaaggtggaaataagagctgctgaagtcatcgatgttgaacccgttgccaagtcagacaagctcttaaaattccgcttggatgctggagatcaagggggcaaccgtcaaattgtctcaggcctccgcgagttctacccggactataaggaattggtcgggaaaaaagttgccatcgttgctaacttaaaagcccgtaaaatggttggggaaatcagccaaggcatgatactgtcagccgaagatagacaagggagcttgaccgtggctgaattgccaagccaaattgaaaatggggctgacttatcctaa

SEQ ID NO: 2076 - protein, 605 aa, Alloiococcus otitidis
MADYIQNLWSYLHISNDQFIRTTDDYHKKIVAKIFDKLYEQGDIYLGEYAGWYSVSDEEYFTENQLEEVYKDDQGKVIGGKAPSGHEVEWVKEESYFFKMSKYSDRLLQYYEDNPGFIQPESRKKEMINNFIKPGLEDLAVTRTTFDWGIPVNADPKHVVYVWIDALSNYITALGYDPDLGGFDQQPDQFKKYWPADIHMVGKEIVRFHTIYWPIMLMALDLPLPKRIYGHGWLLMKDGKMSKSKGNVVYPEFLVDEYGLDPLRYYFVREVPFGSDGVFTPEDFINRINYDLANDLGNLVNRTVSMINKYFDGKVPAYVGPVTDYDEPLAKLAEETIQDYKKKMDDLQFNRAVSSVWNLISRTNKYIDQTEPWLLAKDESKQKELASVMTHLVLSLRVVANLLQPILIESSGKILDQLGLSKLGEQDWKDLHFDVDLAGVQVASKGQPIFPRLDLDQEVAKIKKAMEEGKGKSKAGEEDKDQWEPEKIPLSLDRDEIDFDQFMKVEIRAAEVIDVEPVAKSDKLLKFRLDAGDQGGNRQIVSGLREFYPDYKELVGKKVAIVANLKARKMVGEISQGMILSAEDRQGSLTVAELPSQIENGADLS

SEQ ID NO: 2077 - DNA, 2082 bp, Alloiococcus otitidis; identical to SEQ ID NO: 2075
  CDS (124)..(2079)

SEQ ID NO: 2078 - protein, 652 aa, Alloiococcus otitidis
MACDVISRYKRLQGFDTHFLTGTDEHGQKIEQKAEESGKTPQEYVDEMADYIQNLWSYLHISNDQFIRTTDDYHKKIVAKIFDKLYEQGDIYLGEYAGWYSVSDEEYFTENQLEEVYKDDQGKVIGGKAPSGHEVEWVKEESYFFKMSKYSDRLLQYYEDNPGFIQPESRKKEMINNFIKPGLEDLAVTRTTFDWGIPVNADPKHVVYVWIDALSNYITALGYDPDLGGFDQQPDQFKKYWPADIHMVGKEIVRFHTIYWPIMLMALDLPLPKRIYGHGWLLMKDGKMSKSKGNVVYPEFLVDEYGLDPLRYYFVREVPFGSDGVFTPEDFINRINYDLANDLGNLVNRTVSMINKYFDGKVPAYVGPVTDYDEPLAKLAEETIQDYKKKMDDLQFNRAVSSVWNLISRTNKYIDQTEPWLLAKDESKQKELASVMTHLVLSLRVVANLLQPILIESSGKILDQLGLSKLGEQDWKDLHFDVDLAGVQVASKGQPIFPRLDLDQEVAKIKKAMEEGKGKSKAGEEDKDQWEPEKIPLSLDRDEIDFDQFMKVEIRAAEVIDVEPVAKSDKLLKFRLDAGDQGGNRQIVSGLREFYPDYKELVGKKVAIVANLKARKMVGEISQGMILSAEDRQGSLTVAELPSQIENGADLS

SEQ ID NO: 2079 - DNA, 2082 bp, Alloiococcus otitidis; identical to SEQ ID NO: 2075
  CDS (40)..(2079)

SEQ ID NO: 2080 - protein, 680 aa, Alloiococcus otitidis
MSAENSFYITTPIFYPSGNLHIGNTYTTVACDVISRYKRLQGFDTHFLTGTDEHGQKIEQKAEESGKTPQEYVDEMADYIQNLWSYLHISNDQFIRTTDDYHKKIVAKIFDKLYEQGDIYLGEYAGWYSVSDEEYFTENQLEEVYKDDQGKVIGGKAPSGHEVEWVKEESYFFKMSKYSDRLLQYYEDNPGFIQPESRKKEMINNFIKPGLEDLAVTRTTFDWGIPVNADPKHVVYVWIDALSNYITALGYDPDLGGFDQQPDQFKKYWPADIHMVGKEIVRFHTIYWPIMLMALDLPLPKRIYGHGWLLMKDGKMSKSKGNVVYPEFLVDEYGLDPLRYYFVREVPFGSDGVFTPEDFINRINYDLANDLGNLVNRTVSMINKYFDGKVPAYVGPVTDYDEPLAKLAEETIQDYKKKMDDLQFNRAVSSVWNLISRTNKYIDQTEPWLLAKDESKQKELASVMTHLVLSLRVVANLLQPILIESSGKILDQLGLSKLGEQDWKDLHFDVDLAGVQVASKGQPIFPRLDLDQEVAKIKKAMEEGKGKSKAGEEDKDQWEPEKIPLSLDRDEIDFDQFMKVEIRAAEVIDVEPVAKSDKLLKFRLDAGDQGGNRQIVSGLREFYPDYKELVGKKVAIVANLKARKMVGEISQGMILSAEDRQGSLTVAELPSQIENGADLS

SEQ ID NO: 2081 - DNA, 378 bp, Alloiococcus otitidis
  CDS (73)..(375)
tctagaagacgtttagcggtttcatcggcttctgccttagataatttacctagcttgactggggctagggtgatgttttccctgacggataagtgggggaagaggttaaagtgctggaagaccatgccaatagtttgtctaattttatcaatatccttggcttccgatatttttttgccattgatgacgacagacccagcttgtatttcctctaaacggtttaaacagcggagcagggtggacttaccagaaccagatgggccgataatgcacaccacttcaccttctttaacatctaggtcaatggattttaggacttcattatcgccaaaaaatttctttaactggcgaacttcaactttattggccattatttaa

SEQ ID NO: 2082 - protein, 101 aa, Alloiococcus otitidis
MFSLTDKWGKRLKCWKTMPIVCLILSISLASDIFLPLMTTDPACISSKRFKQRSRVDLPEPDGPIMHTTSPSLTSRSMDFRTSLSPKNFFNWRTSTLLAII

SEQ ID NO: 2083 - DNA, 378 bp, Alloiococcus otitidis; identical to SEQ ID NO: 2081
  CDS (70)..(375)

SEQ ID NO: 2084 - protein, 102 aa, Alloiococcus otitidis
MMFSLTDKWGKRLKCWKTMPIVCLILSISLASDIFLPLMTTDPACISSKRFKQRSRVDLPEPDGPIMHTTSPSLTSRSMDFRTSLSPKNFFNWRTSTLLAII

SEQ ID NO: 2085 - DNA, 378 bp, Alloiococcus otitidis; identical to SEQ ID NO: 2081
  CDS (55)..(375)

SEQ ID NO: 2086 - protein, 107 aa, Alloiococcus otitidis
MTGARVMFSLTDKWGKRLKCWKTMPIVCLILSISLASDIFLPLMTTDPACISSKRFKQRSRVDLPEPDGPIMHTTSPSLTSRSMDFRTSLSPKNFFNWRTSTLLAII

SEQ ID NO: 2087 - DNA, 1500 bp, Alloiococcus otitidis
  CDS (901)..(1497)
cgattgccatgtcgttattttttaagtatactagaaaaaagaggtggaaagatcatgtataaaaggacaaaaacaagtttattgatagcctttacctttattattagtttatttatcggctttggctcaccaagtcaagaagtccaagcccaggataaagtttatgaaatagccaccgatacgacttatgcccccttcgttttccaagagggtgacgactatgtcggtattgatgtggatattttggacgctgtcgccagagaccaaggctttgaatacgaattgaatcccctaggctttaatgcggccttgcaaggcctggaagccaaacaggtagatggtgtgatcgcagggatggggattacagaagagcggaaagagtcctttgacttttccgaaccttactatgaagcagggaccgtctatggcgttgaagccgacagtgagtatgaatctttagaagatttagaaggcgaagttgttgccatcaagaccgggacacacggagctgatgtagccaaatccatgcaagacgactatggctttacaaccagggaatttgaagactcagtcaacatgtacaacgatgtgatggctggcaatgcagcagctgccatcgaagataccccagtcatgtcctatgctattgagacaggccaggtcaacttcagggtgatttccgatgatattgaccggacttcttacggttttgcagtccaaaaaggtgagaatgcggaattgctagacatgttcaaccaaggtctggccaatatcaaagaatcgggagaatatgacgaaattgtccagcgatacgtcggtgaagaagcgattgatagccagcaaacggaaagcggcattttaggccagctgtctgcaaacctcagtaacctgctagggggcttgtggaccaccattagtgtaacagcaatttcgattgtcctagcccttatcctaggggttgttttaggcttgatgcggaccagcgacaacaaggctttagacctgattggtttggtttacatcgatattatgcggggaattcccatgatcgtcttggccttctttgtttacttcggtattccccaattatttaatatcaacctttccgccttccaggctggtgtcattaccttgagtattaacgccggggcttatatcggtgaaattattcggggtggtattaatgctgttgacattggtcagaaagaagccagtcggtcactgggcttaccccaagggaagaccatgcggtatgttattttaccccaagctgttaaaataatggtgccctctttaattaaccaattaatcatgaccttgaaagattcgtctattctctctgtgatcggcttagtcgagctgacccaaactggtcggattatcatcgcccgaacctaccagcccggatccatgtggctgattgttggggccatgtacgttatcttgatcaccattttagccaaactttcgaactacctggaaaggaagtggattaaataa

SEQ ID NO: 2088 - protein, 199 aa, Alloiococcus otitidis
MWTTISVTAISIVLALILGVVLGLMRTSDNKALDLIGLVYIDIMRGIPMIVLAFFVYFGIPQLFNINLSAFQAGVITLSINAGAYIGEIIRGGINAVDIGQKEASRSLGLPQGKTMRYVILPQAVKIMVPSLINQLIMTLKDSSILSVIGLVELTQTGRIIIARTYQPGSMWLIVGAMYVILITILAKLSNYLERKWIK

SEQ ID NO: 2089 - DNA, 1500 bp, Alloiococcus otitidis; identical to SEQ ID NO: 2087
  CDS (55)..(1497)

SEQ ID NO: 2090 - protein, 481 aa, Alloiococcus otitidis
MYKRTKTSLLIAFTFIISLFIGFGSPSQEVQAQDKVYEIATDTTYAPFVFQEGDDYVGIDVDILDAVARDQGFEYELNPLGFNAALQGLEAKQVDGVIAGMGITEERKESFDFSEPYYEAGTVYGVEADSEYESLEDLEGEVVAIKTGTHGADVAKSMQDDYGFTTREFEDSVNMYNDVMAGNAAAAIEDTPVMSYAIETGQVNFRVISDDIDRTSYGFAVQKGENAELLDMFNQGLANIKESGEYDEIVQRYVGEEAIDSQQTESGILGQLSANLSNLLGGLWTTISVTAISIVLALILGVVLGLMRTSDNKALDLIGLVYIDIMRGIPMIVLAFFVYFGIPQLFNINLSAFQAGVITLSINAGAYIGEIIRGGINAVDIGQKEASRSLGLPQGKTMRYVILPQAVKIMVPSLINQLIMTLKDSSILSVIGLVELTQTGRIIIARTYQPGSMWLIVGAMYVILITILAKLSNYLERKWIK

SEQ ID NO: 2091 - DNA, 1500 bp, Alloiococcus otitidis; identical to SEQ ID NO: 2087
  CDS (4)..(1497)

SEQ ID NO: 2092 - protein, 498 aa, Alloiococcus otitidis
MPCRYFLSILEKRGGKIMYKRTKTSLLIAFTFIISLFIGFGSPSQEVQAQDKVYEIATDTTYAPFVFQEGDDYVGIDVDILDAVARDQGFEYELNPLGFNAALQGLEAKQVDGVIAGMGITEERKESFDFSEPYYEAGTVYGVEADSEYESLEDLEGEVVAIKTGTHGADVAKSMQDDYGFTTREFEDSVNMYNDVMAGNAAAAIEDTPVMSYAIETGQVNFRVISDDIDRTSYGFAVQKGENAELLDMFNQGLANIKESGEYDEIVQRYVGEEAIDSQQTESGILGQLSANLSNLLGGLWTTISVTAISIVLALILGVVLGLMRTSDNKALDLIGLVYIDIMRGIPMIVLAFFVYFGIPQLFNINLSAFQAGVITLSINAGAYIGEIIRGGINAVDIGQKEASRSLGLPQGKTMRYVILPQAVKIMVPSLINQLIMTLKDSSILSVIGLVELTQTGRIIIARTYQPGSMWLIVGAMYVILITILAKLSNYLERKWIK

SEQ ID NO: 2093 - DNA, 732 bp, Alloiococcus otitidis
  CDS (4)..(729)
ataatggccaataaagttgaagttcgccagttaaagaaattttttggcgataatgaagtcctaaaatccattgacctagatgttaaagaaggtgaagtggtgtgcattatcggcccatctggttctggtaagtccaccctgctccgctgtttaaaccgtttagaggaaatacaagctgggtctgtcgtcatcaatggcaaaaaaatatcggaagccaaggatattgataaaattagacaaactattggcatggtcttccagcactttaacctcttcccccacttatccgtcagggaaaacatcaccctagccccagtcaagctaggtaaattatctaaggcagaagccgatgaaaccgctaaacgtcttctagatcaagtgggcttggctgacaagttagaagcctatcctgcttccctttcagggggccaaaaacaacgggtggccatcgcccgggccttagccatgaatccagaaatcatgctcttcgatgaaccaacctcagcccttgacccggaaatggttggtgaggtcttaaaagttatgaaagacctgaccaagcaagggatgaccatggtggtggtcacccatgagatgggatttgcctctgaggtggctgaccgggtagtcttgatggatgggggctatgtggtggaagtcaacaccccagacctcctcttcaatgaccctcaagaagagcggtccaaagactttctgaataaaattttataa

SEQ ID NO: 2094 - protein, 242 aa, Alloiococcus otitidis
MANKVEVRQLKKFFGDNEVLKSIDLDVKEGEVVCIIGPSGSGKSTLLRCLNRLEEIQAGSVVINGKKISEAKDIDKIRQTIGMVFQHFNLFPHLSVRENITLAPVKLGKLSKAEADETAKRLLDQVGLADKLEAYPASLSGGQKQRVAIARALAMNPEIMLFDEPTSALDPEMVGEVLKVMKDLTKQGMTMVVVTHEMGFASEVADRVVLMDGGYVVEVNTPDLLFNDPQEERSKDFLNKIL

SEQ ID NO: 2095 - DNA, 801 bp, Alloiococcus otitidis
  CDS (31)..(798)
aaaatgcgaaatcgtataaaggagattgttatgctctttgacagccatacccatattaatgatgagcaattttcacaagacttagaccaagttatggccagggctaaagacatgggggttagccggatgtccgtagtcggttttgactaccctagtatcgaaaaagccttggcgttaagccaggaatacccccaagtctatcctaccattggctggcatccaactgaggccggctcttacaatgaagaggtggaaggctacctccagcagatttatgaaagtggccaggctgtagcggtaggggaaactggtttggactaccattggatggacgatcccaaagaggtccaattccatgtcttccgtcgccagatccaactggccaaggattatgagcttcccgtgaccgttcacaaccgggagtcgaccaaggatgtctaccggatcttggaagaagaaggtctgcctcaagctggcttgattatgcatagtttcaatgtttccacccgctggcttaagcgttttgttaaactcggcgccatgatttccatttctggggtagtgacctttaaaaatgccccagaagtcagagatattgctcaagccacccccctagaccgcttaatggtggagacggatgctccttacctcagtccggaacctaatcggggtaagcggaatgaaccaggatatgtccgttttgttgcggaagaaattgccaaagtaaaaggcttgactgtccaagagttagcacaagtcacttatgataatgctaaccggattttcaaactaaatgaatag

SEQ ID NO: 2096 - protein, 256 aa, Alloiococcus otitidis
MLFDSHTHINDEQFSQDLDQVMARAKDMGVSRMSVVGFDYPSIEKALALSQEYPQVYPTIGWHPTEAGSYNEEVEGYLQQIYESGQAVAVGETGLDYHWMDDPKEVQFHVFRRQIQLAKDYELPVTVHNRESTKDVYRILEEEGLPQAGLIMHSFNVSTRWLKRFVKLGAMISISGVVTFKNAPEVRDIAQATPLDRLMVETDAPYLSPEPNRGKRNEPGYVRFVAEEIAKVKGLTVQELAQVTYDNANRIFKLNE

SEQ ID NO: 2097 - DNA, 801 bp, Alloiococcus otitidis; identical to SEQ ID NO: 2095
  CDS (4)..(798)

SEQ ID NO: 2098 - protein, 265 aa, Alloiococcus otitidis
MRNRIKEIVMLFDSHTHINDEQFSQDLDQVMARAKDMGVSRMSVVGFDYPSIEKALALSQEYPQVYPTIGWHPTEAGSYNEEVEGYLQQIYESGQAVAVGETGLDYHWMDDPKEVQFHVFRRQIQLAKDYELPVTVHNRESTKDVYRILEEEGLPQAGLIMHSFNVSTRWLKRFVKLGAMISISGVVTFKNAPEVRDIAQATPLDRLMVETDAPYLSPEPNRGKRNEPGYVRFVAEEIAKVKGLTVQELAQVTYDNANRIFKLNE

SEQ ID NO: 2099 - DNA, 615 bp, Alloiococcus otitidis
  CDS (22)..(612)
atagtaaagtggggaagggccatgaaaaccattaaggaagttatcgttgttgaggggaaagcagacagtcgccggatcaaagaagtagttagggctgataccattgaaacgaatggctcagctatcgatgacaagattatagatcaaattaggcatgcccaggaaaaaagaggagtcatcattttcactgaccctgatttttcgggagagcagatacggaagattatttcacgccaagtgcccggggtcaaacacgcttttttgtcccaagaggaagccaagcacaagagtcagttgggagacgatagccatgtccctatgagtagctacaagcattctttggggattgaacatgcctccaatgaagctattgagactgccctaggtcaaaagtacactgagcagattggccaaaagcctcctaaaataaccatggcctggttgcgccagcaaggtttggtcgatggggaaaactcggctcatttacggagcctattgggagacaagttgcggatcggctataccaatgccaagcaactgcaaaagcggctagccctctttcacatcaaccaagaacaagttatccgggccttagaagaagtgaaaaaagactag

SEQ ID NO: 2100 - protein, 197 aa, Alloiococcus otitidis
MKTIKEVIVVEGKADSRRIKEVVRADTIETNGSAIDDKIIDQIRHAQEKRGVIIFTDPDFSGEQIRKIISRQVPGVKHAFLSQEEAKHKSQLGDDSHVPMSSYKHSLGIEHASNEAIETALGQKYTEQIGQKPPKITMAWLRQQGLVDGENSAHLRSLLGDKLRIGYTNAKQLQKRLALFHINQEQVIRALEEVKKD

SEQ ID NO: 2101 - DNA, 918 bp, Alloiococcus otitidis
  CDS (22)..(915)
gtgtttgaaaggaaagagttcatgcctcacagcgatattgccagtcccagtcgcacaattgaaattcaaaagaaatatggcctccaagccaagaaaagcttgggccagaattttatcatcgatagtaatattctgcaaaagatggttgactctgctggagttgacaaggatacggtggtcattgaagtcgggccaggtattggtgctttgactgaacaagtggctaggctagccaaagcagtttactcctttgagattgaccaaaggctcctgcctgtcttagaggatagtctggctccttacaaaaatatttccatcatcaaccaggatattctccaagtcgatttgggtcagttttgcagagaccaagatattgaccgagaccgcttggtagtcatggccaaccttccctactacattaccactcctatcattatgcacttcctccaagcccccttaaaattggactatttagcttttatggttcaaaaagaagtcggtcaaagaattgtagctggtcctggcaccaaggcatatgggtccttgtcgattgcggttcaatactatgcccaggcccatattttgtttcaagtgccgaagactgttttccggccccagcccaaggtggattctgcagttattggcctggatattttagaccagcccagtgtttcggtagaagatgaagcctttttcttccaggtcgcccgggcctcctttgcccagcgccggaagaccttgtggaacaatctcagggcccactttggtaaggacaagcaagttcaagccaaggtccaagtcgccctcagtcaagctggtattgacccaggacttaggggcgaggcactgggattagcagactttgctcgtttgacgactgccctaagtgaccagggtttaaaggaagtcagtcactag

SEQ ID NO: 2102 - protein, 298 aa, Alloiococcus otitidis
MPHSDIASPSRTIEIQKKYGLQAKKSLGQNFIIDSNILQKMVDSAGVDKDTVVIEVGPGIGALTEQVARLAKAVYSFEIDQRLLPVLEDSLAPYKNISIINQDILQVDLGQFCRDQDIDRDRLVVMANLPYYITTPIIMHFLQAPLKLDYLAFMVQKEVGQRIVAGPGTKAYGSLSIAVQYYAQAHILFQVPKTVFRPQPKVDSAVIGLDILDQPSVSVEDEAFFFQVARASFAQRRKTLWNNLRAHFGKDKQVQAKVQVALSQAGIDPGLRGEALGLADFARLTTALSDQGLKEVSH

SEQ ID NO: 2103 - DNA, 918 bp, Alloiococcus otitidis; identical to SEQ ID NO: 2101
  CDS (1)..(915)

SEQ ID NO: 2104 - protein, 305 aa, Alloiococcus otitidis
MFERKEFMPHSDIASPSRTIEIQKKYGLQAKKSLGQNFIIDSNILQKMVDSAGVDKDTVVIEVGPGIGALTEQVARLAKAVYSFEIDQRLLPVLEDSLAPYKNISIINQDILQVDLGQFCRDQDIDRDRLVVMANLPYYITTPIIMHFLQAPLKLDYLAFMVQKEVGQRIVAGPGTKAYGSLSIAVQYYAQAHILFQVPKTVFRPQPKVDSAVIGLDILDQPSVSVEDEAFFFQVARASFAQRRKTLWNNLRAHFGKDKQVQAKVQVALSQAGIDPGLRGEALGLADFARLTTALSDQGLKEVSH

SEQ ID NO: 2105 - DNA, 567 bp, Alloiococcus otitidis
  CDS (91)..(564)
ttcttcatcttggtcatcgtcgtggtcatgatcgtcttcgtcgtgatcatgatcgtggtcatcttcgtcgtggtcatgatcatcctcatcatgatcgtggtcatcatggtcatgatcgtcttcgtcgtggtcgtggccatcttcgtcgtggtcatgatcgtcttcatcatggtcgtggtcatcttcgtcgtggtcatgatcgtcttcgtcgtgatcatgatcgtggccatcccctccatggttgtcaacatgaagctcaacccggtccgattcttctccatccacttggtagtagacttcaactgtatcttctatagaatattcaaaggtttcatcgtgagccaaggtctcttcttcgatcacttggccgtcttgttcaacaaaccaagtgacatcttggtcagtgtcgacattggcttgcaagcctgccgtatcacccgtatggtagtggccagccaagccgataaagtcatccgattctgcaccgtgatcatgatcgtggtcattttcatcatgttcatggtcgtggtcgtcttcatcgtgttcatggtcatgaccgctagctaa

SEQ ID NO: 2106 - protein, 158 aa, Alloiococcus otitidis
MIVVIMVMIVFVVVVAIFVVVMIVFIMVVVIFVVVMIVFVVIMIVAIPSMVVNMKLNPVRFFSIHLVVDFNCIFYRIFKGFIVSQGLFFDHLAVLFNKPSDILVSVDIGLQACRITRMVVASQADKVIRFCTVIMIVVIFIMFMVVVVFIVFMVMTAS

SEQ ID NO: 2107 - DNA, 567 bp, Alloiococcus otitidis; identical to SEQ ID NO: 2105
  CDS (28)..(564)

SEQ ID NO: 2108 - protein, 179 aa, Alloiococcus otitidis
MIVFVVIMIVVIFVVVMIILIMIVVIMVMIVFVVVVAIFVVVMIVFIMVVVIFVVVMIVFVVIMIVAIPSMVVNMKLNPVRFFSIHLVVDFNCIFYRIFKGFIVSQGLFFDHLAVLFNKPSDILVSVDIGLQACRITRMVVASQADKVIRFCTVIMIVVIFIMFMVVVVFIVFMVMTAS

SEQ ID NO: 2109 - DNA, 567 bp, Alloiococcus otitidis; identical to SEQ ID NO: 2105
  CDS (22)..(564)

SEQ ID NO: 2110 - protein, 181 aa, Alloiococcus otitidis
MVMIVFVVIMIVVIFVVVMIILIMIVVIMVMIVFVVVVAIFVVVMIVFIMVVVIFVVVMIVFVVIMIVAIPSMVVNMKLNPVRFFSIHLVVDFNCIFYRIFKGFIVSQGLFFDHLAVLFNKPSDILVSVDIGLQACRITRMVVASQADKVIRFCTVIMIVVIFIMFMVVVVFIVFMVMTAS

SEQ ID NO: 2111 - DNA, 567 bp, Alloiococcus otitidis; identical to SEQ ID NO: 2105
  CDS (10)..(564)

SEQ ID NO: 2112 - protein, 185 aa, Alloiococcus otitidis
MVIVVVMIVFVVIMIVVIFVVVMIILIMIVVIMVMIVFVVVVAIFVVVMIVFIMVVVIFVVVMIVFVVIMIVAIPSMVVNMKLNPVRFFSIHLVVDFNCIFYRIFKGFIVSQGLFFDHLAVLFNKPSDILVSVDIGLQACRITRMVVASQADKVIRFCTVIMIVVIFIMFMVVVVFIVFMVMTAS

SEQ ID NO: 2113 - DNA, 1767 bp, Alloiococcus otitidis
  CDS (64)..(1764)
gaatggttacgatttaaattttcaagcaaaaggagaaggaaaatgaagaaaaagatcttgagaatgtcgacttacttagtaacagccagcttattagctgcttgtagtccaggcgggcaagaaaaccaatctggccaagaccaagctcaggctgaccaagaccaggaccagctccaggtaacggcttcctttttcccggtctatgaatttgcacgagaggtagctggtgaccgggcccaggtagatatgattttatcctccaaccaggatgcccatagctttgagcctagtcctcaagacatagcccaggtggaccagtctgatgtctttgtctacagcagtgatgaaatggaattttgggctggagacttgcttgaggctgttgagaatgaagacttagttgtggcaaaagccatcgatggaatggccggggacttagctagcggtcatgaccatgaacacgatgaagacgaccacgaccatgaacatgatgaaaatgaccacgatcatgatcacggtgcagaatcggatgactttatcggcttggctggccactaccatacgggtgatacggcaggcttgcaagccaatgtcgacactgaccaagatgtcacttggtttgttgaacaagacggccaagtgatcgaagaagagaccttggctcacgatgaaacctttgaatattctatagaagatacagttgaagtctactaccaagtggatggagaagaatcggaccgggttgagcttcatgttgacaaccatggaggggatggccacgatcatgatcacgacgaagacgatcatgaccacgacgaagatgaccacgaccatgatgaagacgatcatgaccacgacgaagatggccacgaccacgacgaagacgatcatgaccatgatgaccacgatcatgatgaggatgatcatgaccacgacgaagatgaccacgatcatgatcacgacgaagacgatcatgaccacgacgatgaccaagatgaagaatcaaacgactttattggtttagctggtcattaccacactggtgatacagcaagcttgcaggccaatactgaatcagaccaagatgttacttggtttgtcgaacaagatggtcaagtgatcgaagaagaaaccctggctcacgatgaggcctttgagcatacactagaagattcagtagaagtatactatcaagtagatggggaagaatcggaccgggttgaactccatgtggatgatcacgaagacttggacccccacatttggttagacccagtttatgctcaagaccaggtcaatgctatccgggatgctttcattgaagctgaccctgaaggggaagaagtctacacccaaaatgcagcggactttaacaaacagttggaagaactccaccaagaatacagccagacctttgaaaatgctgaaaatcgaaactttgttgtccagcacgaggcctttggttacctagccaaccgttacgacttaaaccaggtttcgattggtggattgtcaactgaagtggaaccttctccagctcgtattgctgaagttggggacttggtggaggaataccaagtgccggtgatctactatcaagaaggagctgactcttcagctgcccaaactgtcgccgatgaaacaggaacagatattgccgagctttacgacttggaaatcttatcggatgaaatgcaagcggaaaacttgtcctaccttgatgttatggaacgaaacttggaacagttgaagttgagtatccagtaa

SEQ ID NO: 2114 - protein, 567 aa, Alloiococcus otitidis
MSTYLVTASLLAACSPGGQENQSGQDQAQADQDQDQLQVTASFFPVYEFAREVAGDRAQVDMILSSNQDAHSFEPSPQDIAQVDQSDVFVYSSDEMEFWAGDLLEAVENEDLVVAKAIDGMAGDLASGHDHEHDEDDHDHEHDENDHDHDHGAESDDFIGLAGHYHTGDTAGLQANVDTDQDVTWFVEQDGQVIEEETLAHDETFEYSIEDTVEVYYQVDGEESDRVELHVDNHGGDGHDHDHDEDDHDHDEDDHDHDEDDHDHDEDGHDHDEDDHDHDDHDHDEDDHDHDEDDHDHDHDEDDHDHDDDQDEESNDFIGLAGHYHTGDTASLQANTESDQDVTWFVEQDGQVIEEETLAHDEAFEHTLEDSVEVYYQVDGEESDRVELHVDDHEDLDPHIWLDPVYAQDQVNAIRDAFIEADPEGEEVYTQNAADFNKQLEELHQEYSQTFENAENRNFVVQHEAFGYLANRYDLNQVSIGGLSTEVEPSPARIAEVGDLVEEYQVPVIYYQEGADSSAAQTVADETGTDIAELYDLEILSDEMQAENLSYLDVMERNLEQLKLSIQ

SEQ ID NO: 2115 - DNA, 1767 bp, Alloiococcus otitidis; identical to SEQ ID NO: 2113
  CDS (43)..(1764)

SEQ ID NO: 2116 - protein, 574 aa, Alloiococcus otitidis
MKKKILRMSTYLVTASLLAACSPGGQENQSGQDQAQADQDQDQLQVTASFFPVYEFAREVAGDRAQVDMILSSNQDAHSFEPSPQDIAQVDQSDVFVYSSDEMEFWAGDLLEAVENEDLVVAKAIDGMAGDLASGHDHEHDEDDHDHEHDENDHDHDHGAESDDFIGLAGHYHTGDTAGLQANVDTDQDVTWFVEQDGQVIEEETLAHDETFEYSIEDTVEVYYQVDGEESDRVELHVDNHGGDGHDHDHDEDDHDHDEDDHDHDEDDHDHDEDGHDHDEDDHDHDDHDHDEDDHDHDEDDHDHDHDEDDHDHDDDQDEESNDFIGLAGHYHTGDTASLQANTESDQDVTWFVEQDGQVIEEETLAHDEAFEHTLEDSVEVYYQVDGEESDRVELHVDDHEDLDPHIWLDPVYAQDQVNAIRDAFIEADPEGEEVYTQNAADFNKQLEELHQEYSQTFENAENRNFVVQHEAFGYLANRYDLNQVSIGGLSTEVEPSPARIAEVGDLVEEYQVPVIYYQEGADSSAAQTVADETGTDIAELYDLEILSDEMQAENLSYLDVMERNLEQLKLSIQ

SEQ ID NO: 2117 - DNA, 837 bp, Alloiococcus otitidis
  CDS (130)..(834)
tgttatggaacgaaacttggaacagttgaagttgagtatccagtaagtttttctggattgttaaatggtggcctttcagctagaataatagggcggatttatagatataaaataggaaggacggatgctatggaatatatcagggttgaccagcttgcttttcgctacggagatgaacctgttttgcaaaatatttcatttactgtcaatagcggtgagtttgttattttgacaggagaaaacggggcagccaaaaccaccctcttgagaaatatcctaggcttactcagtccttcagaaggccaagttcaattagctgaccgtaaccgctggggtgaaaagctggtggtgggctacgtcccccaaactgtcgcttcctttaacgcgggttttcccagtaccgttttggaactcgttcggtcgggccgctatccgagagggcgatggtttaaacccttgaccaaagaagaccatgaccacgttgaaaaatctctcaagtctgtaggcatgtgggaccagcgccataaaaaaataggtgccttatccgggggacaaaagcagcggatttccttagcacgagtttttgccacagaccctgacctatttgttttggacgagccgactgttggtatggacactgactcccgcaaacagttccaccaattgttgaaacacaataccgaagtccatggcaaggctatcatcatggtgacccatgactatgaagacttgaaaaattatgccgacaagcatattgaactagtgcggaaggaggattcaccttggagatgtttctctatggattcatgcaaagagccttccaagcttcaatcctga

SEQ ID NO: 2118 - protein, 235 aa, Alloiococcus otitidis
MEYIRVDQLAFRYGDEPVLQNISFTVNSGEFVILTGENGAAKTTLLRNILGLLSPSEGQVQLADRNRWGEKLVVGYVPQTVASFNAGFPSTVLELVRSGRYPRGRWFKPLTKEDHDHVEKSLKSVGMWDQRHKKIGALSGGQKQRISLARVFATDPDLFVLDEPTVGMDTDSRKQFHQLLKHNTEVHGKAIIMVTHDYEDLKNYADKHIELVRKEDSPWRCFSMDSCKEPSKLQS

SEQ ID NO: 2119 - DNA, 837 bp, Alloiococcus otitidis; identical to SEQ ID NO: 2117
  CDS (58)..(834)

SEQ ID NO: 2120 - protein, 259 aa, Alloiococcus otitidis
MLNGGLSARIIGRIYRYKIGRTDAMEYIRVDQLAFRYGDEPVLQNISFTVNSGEFVILTGENGAAKTTLLRNILGLLSPSEGQVQLADRNRWGEKLVVGYVPQTVASFNAGFPSTVLELVRSGRYPRGRWFKPLTKEDHDHVEKSLKSVGMWDQRHKKIGALSGGQKQRISLARVFATDPDLFVLDEPTVGMDTDSRKQFHQLLKHNTEVHGKAIIMVTHDYEDLKNYADKHIELVRKEDSPWRCFSMDSCKEPSKLQS

SEQ ID NO: 2121 - DNA, 825 bp, Alloiococcus otitidis
  CDS (526)..(822)
actagtgcggaaggaggattcaccttggagatgtttctctatggattcatgcaaagagccttccaagcttcaatcctgatttccttgattgcccccgtcctaggcttgtttctgattctccgccggcaatccttgctggctgacaccctatcccatgtctcccttgtcggtattgccttaggatttctgatcggccaaaatccaaccttgatgaacatgattgtggtggttttagcagccatgcttttggaatacttaaggtctctctaccggtcttattcggaagtctcgattgccattttaatgtctggtggcatggccctggccctggtcatgatgaccctaaccaataattcggacatgatgtccatcgacaccttcttgtttgggtctattgtcaccgtcagccagtcccaagtctatttgcttttagctattaccttggcagtcttaatcctttatttaatcttccgtaagcccatgtacatccttacctttgatgaagaaacagcctatactctaggcttgccagtcaaattaatgtccattttgttcaatgtcttaacagggatcaccatagcggttatcatgccgattatgggggccttgctggtttcggcggttttaattctaccggccgctatctctatgcgactgtccaaaagcttcaaaggagttatttttatcggcatcctcctaggcttggttgcgacaacagggggcttgatcttctcctacctatacgggacgcctccaggagccaccattaccctgattttgatcttggtctttgccttggtttctttaatcaagtctaaagactag

SEQ ID NO: 2122 - protein, 99 aa, Alloiococcus otitidis
MPVKLMSILFNVLTGITIAVIMPIMGALLVSAVLILPAAISMRLSKSFKGVIFIGILLGLVATTGGLIFSYLYGTPPGATITLILILVFALVSLIKSKD

SEQ ID NO: 2123 - DNA, 825 bp, Alloiococcus otitidis; identical to SEQ ID NO: 2121
  CDS (49)..(822)

SEQ ID NO: 2124 - protein, 258 aa, Alloiococcus otitidis
MQRAFQASILISLIAPVLGLFLILRRQSLLADTLSHVSLVGIALGFLIGQNPTLMNMIVVVLAAMLLEYLRSLYRSYSEVSIAILMSGGMALALVMMTLTNNSDMMSIDTFLFGSIVTVSQSQVYLLLAITLAVLILYLIFRKPMYILTFDEETAYTLGLPVKLMSILFNVLTGITIAVIMPIMGALLVSAVLILPAAISMRLSKSFKGVIFIGILLGLVATTGGLIFSYLYGTPPGATITLILILVFALVSLIKSKD

SEQ ID NO: 2125 - DNA, 825 bp, Alloiococcus otitidis; identical to SEQ ID NO: 2121
  CDS (31)..(822)

SEQ ID NO: 2126 - protein, 264 aa, Alloiococcus otitidis
MFLYGFMQRAFQASILISLIAPVLGLFLILRRQSLLADTLSHVSLVGIALGFLIGQNPTLMNMIVVVLAAMLLEYLRSLYRSYSEVSIAILMSGGMALALVMMTLTNNSDMMSIDTFLFGSIVTVSQSQVYLLLAITLAVLILYLIFRKPMYILTFDEETAYTLGLPVKLMSILFNVLTGITIAVIMPIMGALLVSAVLILPAAISMRLSKSFKGVIFIGILLGLVATTGGLIFSYLYGTPPGATITLILILVFALVSLIKSKD

SEQ ID NO: 2127 - DNA, 825 bp, Alloiococcus otitidis; identical to SEQ ID NO: 2121
  CDS (25)..(822)

SEQ ID NO: 2128 - protein, 266 aa, Alloiococcus otitidis
MEMFLYGFMQRAFQASILISLIAPVLGLFLILRRQSLLADTLSHVSLVGIALGFLIGQNPTLMNMIVVVLAAMLLEYLRSLYRSYSEVSIAILMSGGMALALVMMTLTNNSDMMSIDTFLFGSIVTVSQSQVYLLLAITLAVLILYLIFRKPMYILTFDEETAYTLGLPVKLMSILFNVLTGITIAVIMPIMGALLVSAVLILPAAISMRLSKSFKGVIFIGILLGLVATTGGLIFSYLYGTPPGATITLILILVFALVSLIKSKD

SEQ ID NO: 2129 - DNA, 540 bp, Alloiococcus otitidis
  CDS (52)..(537)
gaggtcattgacttcaatcgggtctccttcagtcacatagacatttttgacatggccactttggtgggcccggacagtggtttccatcttcatggcctcggtaatgacgatagcctggcctttttcaacagagtcccctggtttaaccaggatttccagtacggatcccggcatggtcgctgccaagtgatgtttattggaaggctctgcttttttacggaccgccttggtgctggtaatactttggtctttgatatcaatcgcccgctcttggccgttgagttcaaagtaaagggttcggttgccctcagggtcaggatcagagatggagttcaatttaatgatcaaggtttttcctttttcaatggtaatctcaacccgctcgccttcccgcataccataaaagaaggtgagggagtcaatcttggtgacatccccaaactcttcgtagagcttgcggtagtccagaaagacttgggggtacattacataggaaaggacttcttctggacttggctcatagccgataaggtcttctaa

SEQ ID NO: 2130 - protein, 162 aa, Alloiococcus otitidis
MATLVGPDSGFHLHGLGNDDSLAFFNRVPWFNQDFQYGSRHGRCQVMFIGRLCFFTDRLGAGNTLVFDINRPLLAVEFKVKGSVALRVRIRDGVQFNDQGFSFFNGNLNPLAFPHTIKEGEGVNLGDIPKLFVELAVVQKDLGVHYIGKDFFWTWLIADKVF

SEQ ID NO: 2131 - DNA, 333 bp, Alloiococcus otitidis
  CDS (55)..(330)
aagaccgttgggaggaaatcaaggacatgtacgcctgggtcaaccaaatgtttggtgatattgtcaaggtcaccccatcttctaaagttgtgggagacatggctttatttatggtccaaaacgatttgtccgaagaggagatttatgaaaaaggctctagcttcagctttccccaatcagttatcgactttttccaagggcagttgggccaaccggtgggcggttttccaaaaaaactccagtccatcatcttgggagataaaaagccgattgaaggcagacccggtgattacttggacccggtggactttgaagcggtcaaagcagagttag

SEQ ID NO: 2132 - protein, 92 aa, Alloiococcus otitidis
MILSRSPHLLKLWETWLYLWSKTICPKRRFMKKALASAFPNQLSTFSKGSWANRWAVFQKNSSPSSWEIKSRLKADPVITWTRWTLKRSKQS

SEQ ID NO: 2133 - DNA, 333 bp, Alloiococcus otitidis; identical to SEQ ID NO: 2131
  CDS (52)..(330)

SEQ ID NO: 2134 - protein, 93 aa, Alloiococcus otitidis
MVILSRSPHLLKLWETWLYLWSKTICPKRRFMKKALASAFPNQLSTFSKGSWANRWAVFQKNSSPSSWEIKSRLKADPVITWTRWTLKRSKQS

SEQ ID NO: 2135 - DNA, 3468 bp, Alloiococcus otitidis
  CDS (34)..(3465)
tgctcattaatatttagtgttaggattgattttatggaaaaagttctcgttgctaaccgaggtgaaattgccattcgaatctttcgcgccctgagtgaactggggcttgcgacagttgctatctatgcccaagaagatgaggggagcgttcaccgctttaaagcagacgaagcttaccttattggtgagaacaaaaaacccattgatgcttacttagatattgaaggaatcattcatgtggccaaagattgtggggcggacggtatccatccgggttatggttttctatccgaaaatttggaatttgccaagcgttgccaggaggaaggcattacctttattggtccaagagtcgaacacctggacatgtttggtgacaaactgaaggccaaggcagtagctcaagaagctggcattcccactattcctggctctgacggtccagttgaagatagtcaattggcggtcgattttgctaaccaagctggctacccgattatcatgaaggctgccctgggtggtggcggtcggggaatgcgggttgcccacgatgaagccgaaatcagagaagagtttggtagagcccagtcagaagctcgtgctgcttttggccggggtgatgtctatgtcgaacgttacttagaaaaccctaaacacattgaagtccaaattttaggtgatcaaaacggcaatgtcgttcatttatttgaacgggactgttccatccaacggcgccaccagaaggttgttgaaattgctccttcagtgaccttgtctgaccaggtccgccagcgtatttgtgatgcagctgttcagttagctcaacatgtaggatacttaaatgcaggaacggttgagtttttggttgaaggggaagaattctttttcatcgaagtcaaccccagagtccaagtggaacacaccattacagaaatgattacggatatcgatattgttcaaagccaggtcttaatcgctagtggcttagacctccaccaggatatagatatcccccaacaagaagagattaaaacgaacggctattccatccagtgccgaattacgacagaagatcccttaaataacttttatccagatacaggtaaggttaatacttaccggtcaccaggtggttttggggtaaggctggatgctggcaatggtttcaccggaacggtcgtgacccctttcttcgactcccttttggttaaggccattgtccatgcccgcagctttaccaaggccagccaaaaaatggagcgggttttgcgggagttccgtatccgtggtgtcaagacgaacattcctttcctagccaatgtcgtccgccacccccgtttccaaacaggggacttctcaaccaattttattgatactacaccggaattatttgagtttcccaaagagcggaaccgggggaacaaggccctccgctttatttcagatgtgacggtcaatgcctatcctggtgtggggaatgtggaaaagccccgccttctcaaaccaaagacgccaagcaagttggaagttgtagaccaagctagtccaagctacaagcaagtcttagaccaagaaggccctgaagctgtagcagacagggtcaaggctgaagacaacttgcttttgaccgataccaccttccgggatgcccaccagagtcttcttgctacccgcatgcggtcttacgatatgtttaacatagcccaagagactgaacaagccctgcctcaaattttctcccacgagatgtggggtggggccacctttgatgtagcctaccggtttttgtccgaaagtccgtggaagcgactcaaaaaaatgcggcaactcatgcctaacaccctcttccaaatgctctttagggggtccaatggggtaggctactctgccatgccagacaatgtattggaggaatttattggcctagctgctaagaatggcatcgatattttccgtgtatttgacagcttgaactgggtcccacaaatggaaaaaagtatccaatacgtcagggacaacaacaagattgctgaagctgctatctgctatactggtgacctcaaccatgagggagaaagtaagtataccttagaatactacaaaaacttggccattgaactggaaaaactgggggcccacatcattgccattaaggatatggccggcctgctcaaaccctttgctgcctatcgtttggtctctaccctcaaagaggcagtggacctgcctatccacctccacatgcatgacaccagtggcaatgggatctacagttatgcggcagctacccgggctggtgtggatattgtcgatgtggctgaaaatgccttttcaggcaacactagtcaaccaagcattggctccctttactatgccttggagaacaccccaagagcccctgagttaaacatcaataacttggaaaaaatcaacaaatattggcaggatgtcagaacccagtaccaggcctttgaggaagcagtctcggcttctgcgactgaagtttacaagcaccagatgcctggtggccaatacaccaacttaaaacaacaggctaaaagtattggcctagaagaccgttgggaggaaatcaaggacatgtacgcctgggtcaaccaaatgtttggtgatattgtcaaggtcaccccatcttctaaagttgtgggagacatggctttatttatggtccaaaacgatttgtccgaagaggagatttatgaaaaaggctctagcttcagctttccccaatcagttatcgactttttccaagggcagttgggccaaccggtgggcggttttccaaaaaaactccagtccatcatcttgggagataaaaagccgattgaaggcagacccggtgattacttggacccggtggactttgaagcggtcaaagcagagttagaagaccttatcggctatgagccaagtccagaagaagtcctttcctatgtaatgtacccccaagtctttctggactaccgcaagctctacgaagagtttggggatgtcaccaagattgactccctcaccttcttttatggtatgcgggaaggcgagcgggttgagattaccattgaaaaaggaaaaaccttgatcattaaattgaactccatctctgatcctgaccctgagggcaaccgaaccctttactttgaactcaacggccaagagcgggcgattgatatcaaagaccaaagtattaccagcaccaaggcggtccgtaaaaaagcagagccttccaataaacatcacttggcagcgaccatgccgggatccgtactggaaatcctggttaaaccaggggactctgttgaaaaaggccaggctatcgtcattaccgaggccatgaagatggaaaccactgtccgggcccaccaaagtggccatgtcaaaaatgtctatgtgactgaaggagacccgattgaagtcaatgacctcctagtggaattggatgatgcccagtaa

SEQ ID NO: 2136 - protein, 1144 aa, Alloiococcus otitidis
MEKVLVANRGEIAIRIFRALSELGLATVAIYAQEDEGSVHRFKADEAYLIGENKKPIDAYLDIEGIIHVAKDCGADGIHPGYGFLSENLEFAKRCQEEGITFIGPRVEHLDMFGDKLKAKAVAQEAGIPTIPGSDGPVEDSQLAVDFANQAGYPIIMKAALGGGGRGMRVAHDEAEIREEFGRAQSEARAAFGRGDVYVERYLENPKHIEVQILGDQNGNVVHLFERDCSIQRRHQKVVEIAPSVTLSDQVRQRICDAAVQLAQHVGYLNAGTVEFLVEGEEFFFIEVNPRVQVEHTITEMITDIDIVQSQVLIASGLDLHQDIDIPQQEEIKTNGYSIQCRITTEDPLNNFYPDTGKVNTYRSPGGFGVRLDAGNGFTGTVVTPFFDSLLVKAIVHARSFTKASQKMERVLREFRIRGVKTNIPFLANVVRHPRFQTGDFSTNFIDTTPELFEFPKERNRGNKALRFISDVTVNAYPGVGNVEKPRLLKPKTPSKLEVVDQASPSYKQVLDQEGPEAVADRVKAEDNLLLTDTTFRDAHQSLLATRMRSYDMFNIAQETEQALPQIFSHEMWGGATFDVAYRFLSESPWKRLKKMRQLMPNTLFQMLFRGSNGVGYSAMPDNVLEEFIGLAAKNGIDIFRVFDSLNWVPQMEKSIQYVRDNNKIAEAAICYTGDLNHEGESKYTLEYYKNLAIELEKLGAHIIAIKDMAGLLKPFAAYRLVSTLKEAVDLPIHLHMHDTSGNGIYSYAAATRAGVDIVDVAENAFSGNTSQPSIGSLYYALENTPRAPELNINNLEKINKYWQDVRTQYQAFEEAVSASATEVYKHQMPGGQYTNLKQQAKSIGLEDRWEEIKDMYAWVNQMFGDIVKVTPSSKVVGDMALFMVQNDLSEEEIYEKGSSFSFPQSVIDFFQGQLGQPVGGFPKKLQSIILGDKKPIEGRPGDYLDPVDFEAVKAELEDLIGYEPSPEEVLSYVMYPQVFLDYRKLYEEFGDVTKIDSLTFFYGMREGERVEITIEKGKTLIIKLNSISDPDPEGNRTLYFELNGQERAIDIKDQSITSTKAVRKKAEPSNKHHLAATMPGSVLEILVKPGDSVEKGQAIVITEAMKMETTVRAHQSGHVKNVYVTEGDPIEVNDLLVELDDAQ

SEQ ID NO: 2137 - DNA, 843 bp, Alloiococcus otitidis
  CDS (1)..(840)
atgatgaaaggaggaatatacgtgaaaatcaaacgaagcgaacgtttagtcgacttgacctactacctcatcacccacccctttgaaattgtatccttaacttatttttctgaccgttttcaagctgctaagtctagtgttagtgaagacctggctattattaagaaaaggtttgaaagtcagaaaattgggaagctagagaccataccaggggcttcaggtggggcacgttttatcccccgcctagccaaggaagaccaggaggcaatggttcaagacttgattgatgaaatcaaccacactgagcgacttttgccgggtggtttcatctatttgtcagatatcttgggcaatcctaagtggctccaggtcatcggaaaagttattgccaaccagtatttggaccaagacatcgatacagtcatgactgtagcaactagcggaatcgccgtagcccagagcgtggcaagttacttgaatgtcccttttaaaattgtcacccgggaccccaaggtaacagaagggtcaactgtgagtgttaactatgtttcaggcgcaagtggtcaaagggtcgaaaaaatggagttgtcaagaagaagtttggaagaagggaccaatgttttggtggttgatgactttatccgaagtggggggaccattgaagggatgcggtccttgctggctgagtttaaagctaacttaattgggtcagcagtagttgttgagaatttagtgggcaaaagtgacaaacccaaagactaccaaaccttaatcagcgtggcccagatagacgaagatcaaaagaccatcgaatttgccctcggttccctctttgattcctag

SEQ ID NO: 2138 - protein, 280 aa, Alloiococcus otitidis
MMKGGIYVKIKRSERLVDLTYYLITHPFEIVSLTYFSDRFQAAKSSVSEDLAIIKKRFESQKIGKLETIPGASGGARFIPRLAKEDQEAMVQDLIDEINHTERLLPGGFIYLSDILGNPKWLQVIGKVIANQYLDQDIDTVMTVATSGIAVAQSVASYLNVPFKIVTRDPKVTEGSTVSVNYVSGASGQRVEKMELSRRSLEEGTNVLVVDDFIRSGGTIEGMRSLLAEFKANLIGSAVVVENLVGKSDKPKDYQTLISVAQIDEDQKTIEFALGSLFDS

SEQ ID NO: 2139 - DNA, 1383 bp, Alloiococcus otitidis
  CDS (97)..(1380)
gagctaattgaacacatgaatcgatatgcaattgtcttggctgctggccaaggaactaggatgaaatccaagttatacaaggtcatgcaccccgttatgggcaagcccatggtagcttatgctgtggatgcagcccttgaagctggtgttgaccaagtcgtcaccgtaactggtgtcggcgctgacctagttcaagactacctgggcaataaaagccagtatgttctccaggaagaacagctagggacagcccatgcggtgatgcaggccaaagaaatgttggtggataaggaaggaatctcgattatcctcagtggggatgctcccttgattagtcctgaaacgattgagtccttgctagactaccatgaggcccaccagctaaaagggtctatcctgactgctcatgaagcagacccttatggttacgggagggttatccgtaaccaagacgggacagtggccaagatcgttgaggaaaaagatgccagcccagaggaaaaacaagttcaggaaatcaataccgggacctattgctttgacaaccaagccctctttcaagctttggaccatgtctcaaatgataatgcccaaggagaatattacttgcctgacgtcattgagattttaaaaaaccaaggcgacttggtaggtgcctaccaaatggatgataatacggatgctttaggggtgaacgaccgagtggctctgtcacgggccaatactctgatgcgtcgccggattaaccaggcccatatgaaaaatggggtcagcttgatcgaccccgaatcaacctatattgacgttaacgtcaccattggtcaagatacagtcatcgaacctggtgtttacttaaaaggggagacagaaattggccaggatgcccacattggagctcattcgattattgaagattctcaattgggagatggggtagtcgtcaagcagtcgaccattgaagaagccattatcggccccaattccgatattggtcctaacagccatctaagacctggagctatcttgcaagaatcggtccatgtggggaattatgttgaaatcaagaaatccttagttaaatcaaaagccaagctaggccaccatgcttatgtgggagatgcagaagtcggccagggagttaatgtttcctgtggtgtgatctttgccaattatgacggcaaggacaaacaccggtcagtgatcggggactatgcctttattggaagcaatgttacgattgtttctccggtgacagttgaagcaggggccttcctggcagctggttctaccattacagaggatgtcaagcaagatagcctggctattgcccggtccagacaagtcaacaaagatggttacacaaaaaataaagatcaaggatga

SEQ ID NO: 2140 - protein, 428 aa, Alloiococcus otitidis
MGKPMVAYAVDAALEAGVDQVVTVTGVGADLVQDYLGNKSQYVLQEEQLGTAHAVMQAKEMLVDKEGISIILSGDAPLISPETIESLLDYHEAHQLKGSILTAHEADPYGYGRVIRNQDGTVAKIVEEKDASPEEKQVQEINTGTYCFDNQALFQALDHVSNDNAQGEYYLPDVIEILKNQGDLVGAYQMDDNTDALGVNDRVALSRANTLMRRRINQAHMKNGVSLIDPESTYIDVNVTIGQDTVIEPGVYLKGETEIGQDAHIGAHSIIEDSQLGDGVVVKQSTIEEAIIGPNSDIGPNSHLRPGAILQESVHVGNYVEIKKSLVKSKAKLGHHAYVGDAEVGQGVNVSCGVIFANYDGKDKHRSVIGDYAFIGSNVTIVSPVTVEAGAFLAAGSTITEDVKQDSLAIARSRQVNKDGYTKNKDQG

SEQ ID NO: 2141 - DNA, 1383 bp, Alloiococcus otitidis; identical to SEQ ID NO: 2139
  CDS (16)..(1380)

SEQ ID NO: 2142 - protein, 455 aa, Alloiococcus otitidis
MNRYAIVLAAGQGTRMKSKLYKVMHPVMGKPMVAYAVDAALEAGVDQVVTVTGVGADLVQDYLGNKSQYVLQEEQLGTAHAVMQAKEMLVDKEGISIILSGDAPLISPETIESLLDYHEAHQLKGSILTAHEADPYGYGRVIRNQDGTVAKIVEEKDASPEEKQVQEINTGTYCFDNQALFQALDHVSNDNAQGEYYLPDVIEILKNQGDLVGAYQMDDNTDALGVNDRVALSRANTLMRRRINQAHMKNGVSLIDPESTYIDVNVTIGQDTVIEPGVYLKGETEIGQDAHIGAHSIIEDSQLGDGVVVKQSTIEEAIIGPNSDIGPNSHLRPGAILQESVHVGNYVEIKKSLVKSKAKLGHHAYVGDAEVGQGVNVSCGVIFANYDGKDKHRSVIGDYAFIGSNVTIVSPVTVEAGAFLAAGSTITEDVKQDSLAIARSRQVNKDGYTKNKDQG

SEQ ID NO: 2143 - DNA, 699 bp, Alloiococcus otitidis
  CDS (10)..(696)
agatcaaggatgaaaaaggagtatattatgacaaaaagtcaagccaatgcgagtatcaagctttatgccctgagttccaaccggcctttagctgaaaaaattgctgaagatgttggagtcgaattaggtgatattaccgtgtcgaaattctctgacggtgaaaccagaatcagccccaacgaaagtagccgggggtccaatgtctacatcatccaatccacttctgctcctaccaacgacaacctgatggaattgttgattaccattgatgccatgagacgggcttctgctaaaactattaacgtcgtcatcccttactatggatatgctagacaggaccggaaggcatcttctcgtgagccaattactgccaaacttgtggctaatatgatttcaacagctggtgctgaccgggtagtcactatcgacctccacgcctcccaactccaaggcttctttgacatccccgttgaccacttggtgggggcgcctctcctagctgattggtttttagaccgagatttgagcggtgatgacgtggttgttgtttcaccagaccatggcggcgtgaccagggcccgcaagttggctgaattcttgaattgttctattgctattgtggacaaaagacggcctaaaccaaatgtatccgaagttatgaacttggtcgggaagtatccggtaagaaatgtattttaa

SEQ ID NO: 2144 - protein, 229 aa, Alloiococcus otitidis
MKKEYIMTKSQANASIKLYALSSNRPLAEKIAEDVGVELGDITVSKFSDGETRISPNESSRGSNVYIIQSTSAPTNDNLMELLITIDAMRRASAKTINVVIPYYGYARQDRKASSREPITAKLVANMISTAGADRVVTIDLHASQLQGFFDIPVDHLVGAPLLADWFLDRDLSGDDVVVVSPDHGGVTRARKLAEFLNCSIAIVDKRRPKPNVSEVMNLVGKYPVRNVF

SEQ ID NO: 2145 - DNA, 282 bp, Alloiococcus otitidis
  CDS (25)..(279)
gggataaaagagctggcaaagaggatggcgatgatgagaatatccaaaactttcatctgctgcaaatggagcttgatttttcctaacacgacttcaacctcctcatccgtaaccaggctcaagcatgaaaggcctttgcaaactcctagcccacataaggcaagacaggctcaatttgcttttcttttatggcctggtttagcgcatatgtttaaattgtttctcaaagagaggggagacagggcggttttcatggattcgcttaatggcatggcctactag

SEQ ID NO: 2146 - protein, 85 aa, Alloiococcus otitidis
MAMMRISKTFICCKWSLIFPNTTSTSSSVTRLKHERPLQTPSPHKARQAQFAFLLWPGLAHMFKLFLKERGDRAVFMDSLNGMAY

SEQ ID NO: 2147 - DNA, 369 bp, Alloiococcus otitidis
  CDS (70)..(366)
accaaatgtatccgaagttatgaacttggtcgggaagtatccggtaagaaatgtattttaattgacgacatggttgacacggcaggaacaatatcatcggcggccaaggccttggttgaccgcggtgcaacagacgtttatgctactgccacccacccgattctttcaggaccagctattgaacggattgaagactcgccgattcaaaaaatggtggtcaccgactcgatctatttacctgaagagaaaaaatctgacaagttagaaatcgtctctgtcggagaactagtaggccatgccattaagcgaatccatgaaaaccgccctgtctcccctctctttgagaaacaatttaaacatatgcgctaa

SEQ ID NO: 2148 - protein, 99 aa, Alloiococcus otitidis
MVDTAGTISSAAKALVDRGATDVYATATHPILSGPAIERIEDSPIQKMVVTDSIYLPEEKKSDKLEIVSVGELVGHAIKRIHENRPVSPLFEKQFKHMR

SEQ ID NO: 2149 - DNA, 570 bp, Alloiococcus otitidis
  CDS (115)..(567)
gcctgtcttgccttatgtgggctaggagtttgcaaaggcctttcatgcttgagcctggttacggatgaggaggttgaagtcgtgttaggaaaaatcaagctccatttgcagcagatgaaagttttggatattctcatcatcgccatcctctttgccagctcttttatccctcatgccatttacgcctaccaactccagcaattagatgaccaggctgttaaagttgtggcccgagtgaccatcgatggccaggaagtctattcgacggaattatcggaggagaccccccatgaagaattcaccctctacccagaagagggccagtataacgttattgaggttgatggtgaccggattcggaacaaggaagacaatagtcccaaccaaattggggtgaaaaggggatggattagcaagccgggcgaatctgccattgtcttgccccaccgactagtggtagatgtccatgccgttaacgatgacggtcaggaagttagtccgggcaacttagaagaccaggaggacgaatctggtatccaagaccaagaagatgtgatcattcctaattaa

SEQ ID NO: 2150 - protein, 151 aa, Alloiococcus otitidis
MKVLDILIIAILFASSFIPHAIYAYQLQQLDDQAVKVVARVTIDGQEVYSTELSEETPHEEFTLYPEEGQYNVIEVDGDRIRNKEDNSPNQIGVKRGWISKPGESAIVLPHRLVVDVHAVNDDGQEVSPGNLEDQEDESGIQDQEDVIIPN

SEQ ID NO: 2151 - DNA, 570 bp, Alloiococcus otitidis; identical to SEQ ID NO: 2149
  CDS (82)..(567)

SEQ ID NO: 2152 - protein, 162 aa, Alloiococcus otitidis
MLGKIKLHLQQMKVLDILIIAILFASSFIPHAIYAYQLQQLDDQAVKVVARVTIDGQEVYSTELSEETPHEEFTLYPEEGQYNVIEVDGDRIRNKEDNSPNQIGVKRGWISKPGESAIVLPHRLVVDVHAVNDDGQEVSPGNLEDQEDESGIQDQEDVIIPN

SEQ ID NO: 2153 - DNA, 570 bp, Alloiococcus otitidis; identical to SEQ ID NO: 2149
  CDS (49)..(567)

SEQ ID NO: 2154 - protein, 173 aa, Alloiococcus otitidis
MSLVTDEEVEVVLGKIKLHLQQMKVLDILIIAILFASSFIPHAIYAYQLQQLDDQAVKVVARVTIDGQEVYSTELSEETPHEEFTLYPEEGQYNVIEVDGDRIRNKEDNSPNQIGVKRGWISKPGESAIVLPHRLVVDVHAVNDDGQEVSPGNLEDQEDESGIQDQEDVIIPN

SEQ ID NO: 2155 - DNA, 363 bp, Alloiococcus otitidis
  CDS (85)..(360)
ccatcattggtccattcgcctaaaacttcaagaccaaccgggacaactgcttccccgtcagttctttcagctgccttgtcaaaggtgtcttggctgtcagcttcgtcaccttcaccatcagctgcctcttcctctgaatcttcttcagtggcttcgtcatcttggccttcttcggtctcttcttggtcttctgctggctcttcagtcgcttcttcagtttcagcagggtcttcagcttggtcttggcaagctgccaaagttagagaagaaacggccaataaagcgatcaatttttttaaggtcatttctatatcccccctaatattagtcgatataaattattttaacataaataaaatataa

SEQ ID NO: 2156 - protein, 92 aa, Alloiococcus otitidis
MSWLSASSPSPSAASSSESSSVASSSWPSSVSSWSSAGSSVASSVSAGSSAWSWQAAKVREETANKAINFFKVISISPLILVDINYFNINKI

SEQ ID NO: 2157 - DNA, 363 bp, Alloiococcus otitidis; identical to SEQ ID NO: 2155
  CDS (7)..(360)

SEQ ID NO: 2158 - protein, 118 aa, Alloiococcus otitidis
MVHSPKTSRPTGTTASPSVLSAALSKVSWLSASSPSPSAASSSESSSVASSSWPSSVSSWSSAGSSVASSVSAGSSAWSWQAAKVREETANKAINFFKVISISPLILVDINYFNINKI

SEQ ID NO: 2159 - DNA, 645 bp, Alloiococcus otitidis
  CDS (34)..(642)
tttatatcgactaatattaggggggatatagaaatgaccttaaaaaaattgatcgctttattggccgtttcttctctaactttggcagcttgccaagaccaagctgaagaccctgctgaaactgaagaagcgactgaagagccagcagaagaccaagaagagaccgaagaaggccaagatgacgaagccactgaagaagattcagaggaagaggcagctgatggtgaaggtgacgaagctgacagccaagacacctttgacaaggcagctgaaagaactgacggggaagcagttgtcccggttggtcttgaagttttaggcgaatggaccaatgatggctatgttgtaaccagttctggccctcaagctgaaattaacctcaatattttgccagatgaaggtgtcgaacaattctacgtctacattactgacgaagatggaactatccttgacaaggcagagaatgaggttgaatatatttactctgttgatggcgttgaggacgaaatcgtcttatacgctgggacttccgaagatgatctcgatgaggtagatgatacggtagatccagaacaggactttgtccgtaatgaacggattatcatccaaccaggtgaagaagttccggaagaagaggaagcataa

SEQ ID NO: 2160 - protein, 203 aa, Alloiococcus otitidis
MTLKKLIALLAVSSLTLAACQDQAEDPAETEEATEEPAEDQEETEEGQDDEATEEDSEEEAADGEGDEADSQDTFDKAAERTDGEAVVPVGLEVLGEWTNDGYVVTSSGPQAEINLNILPDEGVEQFYVYITDEDGTILDKAENEVEYIYSVDGVEDEIVLYAGTSEDDLDEVDDTVDPEQDFVRNERIIIQPGEEVPEEEEA

SEQ ID NO: 2161 - DNA, 444 bp, Alloiococcus otitidis
  CDS (1)..(441)
atgaagtggttggaaaaaatctacttttacttacatggtcgctacggcagaatagatggcttttctaaatttttagtcctcctagccatcctgcttttagccttgagcaatcttttatcgactaggctagccttttacttgggcttggccctacttgcctatgcctcgctcagacccttatccaaggaaacagctaaccggaggaaagaagaggctatctaccaagatgtcaagggtcaagttaaatcttttgggagaaagcttcaagctttcttcaattcaggtaaaaagagggcccgaagcagtcaaactgagccaattaggcctaatgacaaaactattgtcatttgccccaaatgccagcaaaaattgcgggtagacgaggggaaaaagctcaggataacttgccctaaatgtgggacagtttttaccagccatagctag

SEQ ID NO: 2162 - protein, 147 aa, Alloiococcus otitidis
MKWLEKIYFYLHGRYGRIDGFSKFLVLLAILLLALSNLLSTRLAFYLGLALLAYASLRPLSKETANRRKEEAIYQDVKGQVKSFGRKLQAFFNSGKKRARSSQTEPIRPNDKTIVICPKCQQKLRVDEGKKLRITCPKCGTVFTSHS

SEQ ID NO: 2163 - DNA, 657 bp, Alloiococcus otitidis
  CDS (286)..(654)
ctagaaggaatgaaatttgaaaactactgggcaagggcccagcttttttgcttatcggaaatttttagtttactaggaaggtatggagacaggatgaagttaattttcggactgggcaacccaggcgacaagtaccggtcaaccaagcataatataggctttatcacccttgatgaaatagcctttcaaatggggttagcctttaacaagagtcagtttcaatcggtttatgccgaaggtcggatggggagcgaaaaagtcttcctgatcaaaccccaaacctttatgaacctctctggccaatctgtcagaccttggctggattactacgatttagatgaagggtcggacatggtcgttgtccatgatgatttagacttggctgttggccaagtcaggctgagagaccaaggggggcatggtggccacaatggcttaaggagtattatcaaggagaccgggagtaaaaaattcaaccggataaaaatcggcatcggccgacccaagggtaagatgtcagtggtctcccatgtcttaagccaattcccccaagaagaccaccaggttatgatggaggcggtgacccactcttacaaggccctccaagcctggggggaaggcatgcccttccaagaagtgatgagcaagtttaactga

SEQ ID NO: 2164 - protein, 123 aa, Alloiococcus otitidis
MNLSGQSVRPWLDYYDLDEGSDMVVVHDDLDLAVGQVRLRDQGGHGGHNGLRSIIKETGSKKFNRIKIGIGRPKGKMSVVSHVLSQFPQEDHQVMMEAVTHSYKALQAWGEGMPFQEVMSKFN

SEQ ID NO: 2165 - DNA, 657 bp, Alloiococcus otitidis; identical to SEQ ID NO: 2163
  CDS (10)..(654)

SEQ ID NO: 2166 - protein, 215 aa, Alloiococcus otitidis
MKFENYWARAQLFCLSEIFSLLGRYGDRMKLIFGLGNPGDKYRSTKHNIGFITLDEIAFQMGLAFNKSQFQSVYAEGRMGSEKVFLIKPQTFMNLSGQSVRPWLDYYDLDEGSDMVVVHDDLDLAVGQVRLRDQGGHGGHNGLRSIIKETGSKKFNRIKIGIGRPKGKMSVVSHVLSQFPQEDHQVMMEAVTHSYKALQAWGEGMPFQEVMSKFN

SEQ ID NO: 2167 - DNA, 3489 bp, Alloiococcus otitidis
  CDS (184)..(3486)
ccggtattgctggttcggcccgggccccttttttcctatgctctgctagaagaaaagcaagaccagataatctggattagccaaaatagcttccatgctaataagttggctagcagtttaagtgactttttaccccaggataaaatccatgtttttgaaaccaatgatgtcctccacgctgaaatggcctttgcgtccccagaagccgtggcagaccgggtggagaccatggaatttttggcttcaggccagcctgggattgtcatcatccctttggccggagtccgcaagcttttgcctagcctggacctctaccgcaagatgcctttgacgattcaaatggcttctgatttagacttagatgacctcagccggcacttggttaagattggctaccactatgaccaaaaagttgctaaacctggtgagttcagcataaggggtgggatcattgatatctttccgatcggctaccaagacccagtccggattgaactctttgatacggaagtcgactccatgcggcggtttgacttggagagtcagcggtcagtcgaaaacattgaccaagtccgtatcctaccagccaaggactattttttaaccgaagacaaccaagcccaagccctcaaagcctttaatgacaagctggactataccatgcaaaaattaagggaccaagacttgaaaaaagacttggccaaaaatatgacccgggttgaggacagtctcaaagccggtgaaagctctgacctcctagctccttttgtgggcctcctctaccctgacaagacaagtattttagactatgccaaagagtcggctatctttttagtagatgagtaccctagagtggttgcaaacaatgcccaattaaatgacgaagaggctctttggcagaccgaccaattatctcggggaaagatacttcatgacctcagcttcagtcaggactttagggacttaatgggggctaaagagcagggcaaaatttacttctccctcttccaaaaggggatggggtctttgaaactggactctattacccccatccactaccgacagatgcaaaagttctttggccaaatgcccatggtaaaaactgaaatggagcggtatgacaaacagaactatactgttgtcgttatggccgaagatgaggatcgggcccaagccattcaagcaacctttgccgactttgatattccttgcttattaactgagccggatcaaattgaagtcggccaggttcaagtgatcccccaagctattccagaaggctttgagttaattgggaccaagctagccctgatagcggaatccgacctctttaaccgggtcaccaagaaaaaagcccgccggagacaagtgtcaaatgcggaacgactcaaaagctataatgagctccagccaggggattatgtggtccatacccagcatggaatcggccgctaccaaggtctggaaaccatgacgattgatgggataaaccaggactatctagcagtagaatacgaccaagcttccaaactctatattcccgtgagccaactcaacctcctgcaaaaatatgtggcttctgaagggaaaacccctaaaatcaacaagcttggggggacatcctgggctaaaaccaagcggaaggtccaaagtcaagtggaagacattgccgacgacctgatcgacctctatgctagccgggagagccaaaagggttacgcctttgaaaaagacaatgactaccaagctgcattcgaagcttctttcccttacaaggagacggaagaccaactccggtcggcggaggaagttaagtccgatatggaaagtgataagcccatggaccggctcttggtcggggacgttggttacggcaagacggaagtggctatccgggcgatctttaaggccgtccaagaaggcaagcaagccgctttcttagttcccactaccgtcttagcccagcaacactatgaaaccatgctggaccgctttgctgactttccagttgaaattggtctaatgagtcggttcaagactaaaaaagaaatcgatgaaaccatcggccgcttgaaagacgggacactggatgtggtggtagggacccaccgcctcttgtccaaggatgtccaatttttagacttgggcctcttggtggttgacgaagagcagcgctttggggtcaaacacaaggaacggttgaaagagttaaaagagttagtggacgtcctaaccttgaccgctactcctattccccgaaccctccatatgtccatgctgggggtccgggacctatccgtcattgaaacaccacctgccaaccgctacccggtccaaacctatgtgatggagatgaacgagcttgtcattaaggaagccattgaaagagaaatggcccgggacggtcaagttttctttcttcacaaccgggtggacaccattgaaagacggatgagtgatatccaggcccttgtgccggaagctagagtgacctatgtccatggccaaatgactgaaaaccagctggaagagcgactctaccagtttttatccggcgaatatgacgttttagtgaccacaaccattattgaaacaggggtggacatgcccaatgtcaacaccttgctggtggaagatgccgaccggatgggcctatcccaactttaccagcttagaggacgggtcggccggagcaaccggatcgcctatgcctactttatgcaccaggctgacaaggttctaactgaggtgagcgaaagccgcctacaagccatcaaagacttcaccgaactggggtctggcttcaagattgccatgcgggacttgtccatccgtggggcaggcaacctcttaggcaaggagcaacacggctttatcgatgctgttgggttcgacctctactcccagatgttagaagaagcagttgccaaaaaacgtggccaggaagtcagggaggctacttcagccgaattagacctatcacttaacgcctacctaccaagcgattatattgaagatgagtctcaaaaaattgacctctataaacgcatccgccaacttgaatcagaagcagactaccgggaccttcaagatgaactacttgaccgctttggcgagttccctgaagaagtggacctactcttacggataggcttgctcaagcactatagtgaagagagcctggtcgaaaaaattgaaaatacaggcaaaaaaatcaagatggattttgcccaatcagcccttgccgtcttccctatggcagctatcttcaaggctctcaagggaataccggttaaaactgacatgaaaaccgaaaaccagctccaggtttcctttattttgagccgcaacaccgaccaagcaacttggttaaaagccttgttggactttacccaatctttagcagactaccgtagggaaaaagaagcagacaaagatccaaccactccaggtgtagttaaagagggaggggcccagtctcatggctaa

SEQ ID NO: 2168 - protein, 1101 aa, Alloiococcus otitidis
MAFASPEAVADRVETMEFLASGQPGIVIIPLAGVRKLLPSLDLYRKMPLTIQMASDLDLDDLSRHLVKIGYHYDQKVAKPGEFSIRGGIIDIFPIGYQDPVRIELFDTEVDSMRRFDLESQRSVENIDQVRILPAKDYFLTEDNQAQALKAFNDKLDYTMQKLRDQDLKKDLAKNMTRVEDSLKAGESSDLLAPFVGLLYPDKTSILDYAKESAIFLVDEYPRVVANNAQLNDEEALWQTDQLSRGKILHDLSFSQDFRDLMGAKEQGKIYFSLFQKGMGSLKLDSITPIHYRQMQKFFGQMPMVKTEMERYDKQNYTVVVMAEDEDRAQAIQATFADFDIPCLLTEPDQIEVGQVQVIPQAIPEGFELIGTKLALIAESDLFNRVTKKKARRRQVSNAERLKSYNELQPGDYVVHTQHGIGRYQGLETMTIDGINQDYLAVEYDQASKLYIPVSQLNLLQKYVASEGKTPKINKLGGTSWAKTKRKVQSQVEDIADDLIDLYASRESQKGYAFEKDNDYQAAFEASFPYKETEDQLRSAEEVKSDMESDKPMDRLLVGDVGYGKTEVAIRAIFKAVQEGKQAAFLVPTTVLAQQHYETMLDRFADFPVEIGLMSRFKTKKEIDETIGRLKDGTLDVVVGTHRLLSKDVQFLDLGLLVVDEEQRFGVKHKERLKELKELVDVLTLTATPIPRTLHMSMLGVRDLSVIETPPANRYPVQTYVMEMNELVIKEAIEREMARDGQVFFLHNRVDTIERRMSDIQALVPEARVTYVHGQMTENQLEERLYQFLSGEYDVLVTTTIIETGVDMPNVNTLLVEDADRMGLSQLYQLRGRVGRSNRIAYAYFMHQADKVLTEVSESRLQAIKDFTELGSGFKIAMRDLSIRGAGNLLGKEQHGFIDAVGFDLYSQMLEEAVAKKRGQEVREATSAELDLSLNAYLPSDYIEDESQKIDLYKRIRQLESEADYRDLQDELLDRFGEFPEEVDLLLRIGLLKHYSEESLVEKIENTGKKIKMDFAQSALAVFPMAAIFKALKGIPVKTDMKTENQLQVSFILSRNTDQATWLKALLDFTQSLADYRREKEADKDPTTPGVVKEGGAQSHG

SEQ ID NO: 2169 - DNA, 3489 bp, Alloiococcus otitidis; identical to SEQ ID NO: 2167
  CDS (7)..(3486)

SEQ ID NO: 2170 - protein, 1160 aa, Alloiococcus otitidis
MLVRPGPLFSYALLEEKQDQIIWISQNSFHANKLASSLSDFLPQDKIHVFETNDVLHAEMAFASPEAVADRVETMEFLASGQPGIVIIPLAGVRKLLPSLDLYRKMPLTIQMASDLDLDDLSRHLVKIGYHYDQKVAKPGEFSIRGGIIDIFPIGYQDPVRIELFDTEVDSMRRFDLESQRSVENIDQVRILPAKDYFLTEDNQAQALKAFNDKLDYTMQKLRDQDLKKDLAKNMTRVEDSLKAGESSDLLAPFVGLLYPDKTSILDYAKESAIFLVDEYPRVVANNAQLNDEEALWQTDQLSRGKILHDLSFSQDFRDLMGAKEQGKIYFSLFQKGMGSLKLDSITPIHYRQMQKFFGQMPMVKTEMERYDKQNYTVVVMAEDEDRAQAIQATFADFDIPCLLTEPDQIEVGQVQVIPQAIPEGFELIGTKLALIAESDLFNRVTKKKARRRQVSNAERLKSYNELQPGDYVVHTQHGIGRYQGLETMTIDGINQDYLAVEYDQASKLYIPVSQLNLLQKYVASEGKTPKINKLGGTSWAKTKRKVQSQVEDIADDLIDLYASRESQKGYAFEKDNDYQAAFEASFPYKETEDQLRSAEEVKSDMESDKPMDRLLVGDVGYGKTEVAIRAIFKAVQEGKQAAFLVPTTVLAQQHYETMLDRFADFPVEIGLMSRFKTKKEIDETIGRLKDGTLDVVVGTHRLLSKDVQFLDLGLLVVDEEQRFGVKHKERLKELKELVDVLTLTATPIPRTLHMSMLGVRDLSVIETPPANRYPVQTYVMEMNELVIKEAIEREMARDGQVFFLHNRVDTIERRMSDIQALVPEARVTYVHGQMTENQLEERLYQFLSGEYDVLVTTTIIETGVDMPNVNTLLVEDADRMGLSQLYQLRGRVGRSNRIAYAYFMHQADKVLTEVSESRLQAIKDFTELGSGFKIAMRDLSIRGAGNLLGKEQHGFIDAVGFDLYSQMLEEAVAKKRGQEVREATSAELDLSLNAYLPSDYIEDESQKIDLYKRIRQLESEADYRDLQDELLDRFGEFPEEVDLLLRIGLLKHYSEESLVEKIENTGKKIKMDFAQSALAVFPMAAIFKALKGIPVKTDMKTENQLQVSFILSRNTDQATWLKALLDFTQSLADYRREKEADKDPTTPGVVKEGGAQSHG

SEQ ID NO: 2171 - DNA, 1632 bp, Alloiococcus otitidis
  CDS (1243)..(1629)
ttaaagagggaggggcccagtctcatggctaaaggaaaggagagtcctcccctgcaacaaggggctacctttacccctcctagtcactcctttcgaggggctagtttactggccctagccctcttgttgtccaagttcttaagcgctgtttacaaggtccccttgcaaaatttaactggggacgccggtttttatgtttaccagcaggtctatcctttatatggcatcggtctagttttcacctattctggcctgccggtttttatttccaagcttttggccgaatgccaaactgaccaagaccggctaagccaggcccgaaaaatttttaccctcctggtcatgcttactctgccccttagcttcttactttttgctttttcaggaagcttggcccaagtgatgggggacggccacctgtctactatgattaaattagtcagtcttttttacctttttattcccctcttggcaactagccgaggctttttccagtccaagcttgatatggctcccgttgccttgtcccaggtcttggaacagctgggacgggtgaccattattattttagcagcccttgcctttgcaagtctcgatatatccctctaccagatgggtggcttagccatgacatcttctatcctctcacccctcctagccagcctggtcttactcttgttttttaaccggcgtgacggtgggctggggcaaagctttggcttcagcctgccaagttttgggatggccaaagcttttatcttagaaggtggccaaactgttattgtctacagtcttttactcttctttcaattgcttgattcctttaccgttttcaaaaacctcaagcaagcaggactaccagccggacaagccatgctagccaaaggcgtatatgaccgggcccaaccctttgcccaggtcggcttgacactagccttggccatggccatgaacctagttcctagtttgacccagttctttaaccggggcgactataaaaactggctgaagctatctcagtccaccttcaagttaagtttggtcttaggatcagcgaccagtttggggctgattgctgtcatgcccttgcttaaccaagccttttttgcggattcaaaagggattcaagtcctccagctttatatgggtctcgtctttttcctctccatcagcttaacccttcatgccattttgcagtcgacctcggttgaccactttacgggctacgccatcttattcgtcttgggcctaaaagcccttctcaaccctcttttaattcggtcagctgggatcatgggggctggtagtttgacagtggtcttgacggccttgttaagcttgatcatgtttatccaagtacctcggcatgtttggcaatttatcttccaggctcgctttttagtcaaattcctcttggctaacgctttgatgtattttctggtctcctacctggcaaatttgcttcaagaccaaggccggctagaagctttattaggagcagttgccttgtctggtcttggcctcattatctatacccttgtcagcttgcgcctaaaaatattagacccagctagcctggctaccctaccctttgcaaaaatactcaagaaagttggaggctattatgactaa

SEQ ID NO: 2172 - protein, 129 aa, Alloiococcus otitidis
MGLKALLNPLLIRSAGIMGAGSLTVVLTALLSLIMFIQVPRHVWQFIFQARFLVKFLLANALMYFLVSYLANLLQDQGRLEALLGAVALSGLGLIIYTLVSLRLKILDPASLATLPFAKILKKVGGYYD

SEQ ID NO: 2173 - DNA, 1632 bp, Alloiococcus otitidis; identical to SEQ ID NO: 2171
  CDS (613)..(1629)

SEQ ID NO: 2174 - protein, 339 aa, Alloiococcus otitidis
MGGLAMTSSILSPLLASLVLLLFFNRRDGGLGQSFGFSLPSFGMAKAFILEGGQTVIVYSLLLFFQLLDSFTVFKNLKQAGLPAGQAMLAKGVYDRAQPFAQVGLTLALAMAMNLVPSLTQFFNRGDYKNWLKLSQSTFKLSLVLGSATSLGLIAVMPLLNQAFFADSKGIQVLQLYMGLVFFLSISLTLHAILQSTSVDHFTGYAILFVLGLKALLNPLLIRSAGIMGAGSLTVVLTALLSLIMFIQVPRHVWQFIFQARFLVKFLLANALMYFLVSYLANLLQDQGRLEALLGAVALSGLGLIIYTLVSLRLKILDPASLATLPFAKILKKVGGYYD

SEQ ID NO: 2175 - DNA, 1632 bp, Alloiococcus otitidis; identical to SEQ ID NO: 2171
  CDS (403)..(1629)

SEQ ID NO: 2176 - protein, 409 aa, Alloiococcus otitidis
MGDGHLSTMIKLVSLFYLFIPLLATSRGFFQSKLDMAPVALSQVLEQLGRVTIIILAALAFASLDISLYQMGGLAMTSSILSPLLASLVLLLFFNRRDGGLGQSFGFSLPSFGMAKAFILEGGQTVIVYSLLLFFQLLDSFTVFKNLKQAGLPAGQAMLAKGVYDRAQPFAQVGLTLALAMAMNLVPSLTQFFNRGDYKNWLKLSQSTFKLSLVLGSATSLGLIAVMPLLNQAFFADSKGIQVLQLYMGLVFFLSISLTLHAILQSTSVDHFTGYAILFVLGLKALLNPLLIRSAGIMGAGSLTVVLTALLSLIMFIQVPRHVWQFIFQARFLVKFLLANALMYFLVSYLANLLQDQGRLEALLGAVALSGLGLIIYTLVSLRLKILDPASLATLPFAKILKKVGGYYD

SEQ ID NO: 2177 - DNA, 1632 bp, Alloiococcus otitidis; identical to SEQ ID NO: 2171
  CDS (277)..(1629)

SEQ ID NO: 2178 - protein, 451 aa, Alloiococcus otitidis
MAECQTDQDRLSQARKIFTLLVMLTLPLSFLLFAFSGSLAQVMGDGHLSTMIKLVSLFYLFIPLLATSRGFFQSKLDMAPVALSQVLEQLGRVTIIILAALAFASLDISLYQMGGLAMTSSILSPLLASLVLLLFFNRRDGGLGQSFGFSLPSFGMAKAFILEGGQTVIVYSLLLFFQLLDSFTVFKNLKQAGLPAGQAMLAKGVYDRAQPFAQVGLTLALAMAMNLVPSLTQFFNRGDYKNWLKLSQSTFKLSLVLGSATSLGLIAVMPLLNQAFFADSKGIQVLQLYMGLVFFLSISLTLHAILQSTSVDHFTGYAILFVLGLKALLNPLLIRSAGIMGAGSLTVVLTALLSLIMFIQVPRHVWQFIFQARFLVKFLLANALMYFLVSYLANLLQDQGRLEALLGAVALSGLGLIIYTLVSLRLKILDPASLATLPFAKILKKVGGYYD

SEQ ID NO: 2179 - DNA, 1632 bp, Alloiococcus otitidis; identical to SEQ ID NO: 2171
  CDS (25)..(1629)

SEQ ID NO: 2180 - protein, 535 aa, Alloiococcus otitidis
MAKGKESPPLQQGATFTPPSHSFRGASLLALALLLSKFLSAVYKVPLQNLTGDAGFYVYQQVYPLYGIGLVFTYSGLPVFISKLLAECQTDQDRLSQARKIFTLLVMLTLPLSFLLFAFSGSLAQVMGDGHLSTMIKLVSLFYLFIPLLATSRGFFQSKLDMAPVALSQVLEQLGRVTIIILAALAFASLDISLYQMGGLAMTSSILSPLLASLVLLLFFNRRDGGLGQSFGFSLPSFGMAKAFILEGGQTVIVYSLLLFFQLLDSFTVFKNLKQAGLPAGQAMLAKGVYDRAQPFAQVGLTLALAMAMNLVPSLTQFFNRGDYKNWLKLSQSTFKLSLVLGSATSLGLIAVMPLLNQAFFADSKGIQVLQLYMGLVFFLSISLTLHAILQSTSVDHFTGYAILFVLGLKALLNPLLIRSAGIMGAGSLTVVLTALLSLIMFIQVPRHVWQFIFQARFLVKFLLANALMYFLVSYLANLLQDQGRLEALLGAVALSGLGLIIYTLVSLRLKILDPASLATLPFAKILKKVGGYYD

SEQ ID NO: 2181 - DNA, 1134 bp, Alloiococcus otitidis
  CDS (61)..(1131)
acccagctagcctggctaccctaccctttgcaaaaatactcaagaaagttggaggctattatgactaagacacacgcgataaaaatcttcggtttgggccccagtgacctggaccacctgtctttgggaatctaccgtcgaattttagaccaaggtaagatctacgtgcgaacacaagaccacccggttgtgaatgaactaagggagtccggggtgaccattgagtcctttgactgggtttatgacctctacccagacagttttgaccaggtttacgaccggatctgccaggaagttttaaaactagcccaagataaagaagtcctttatggcgttccaggtcaccccagggtgggggagcagaccacggtcttgttagaagcagccagtgaccaggtccaagtcttgggagggcaaagttttattgacgacctctttaatgcagtgggagttgacccggttgaaggttttcaattagtagatgccttggccgttcaagctgatgacctagtgactaagcaacatttgattgtcatgcaggtttttagtagcttggttgctggggacctgaagttgaccttaatggaccaatacccggatgaacaccccgtctacctggtagatgctgctgggggtaaaaaccaggccgtctaccgcctccctttagccaaaattgaccactttgagggcgtccataacttacgaaccctttacgtcccacctttggaccgggatgaccgaagccggtcatttgccaccttgttgtcttatacagatgagatcatggggcccggtggggatgcttggattaaggaaaaatcaagtaaggacttgatcccctaccttaaggaagaaacggcggaattagtggcagccattgaggcagaaaatgatgacaatattgtcgaagaattaggggaccttttgatgcaggtggtctaccaggccaagctgggagaacaagaatcttatttttcgattgaagacgttcttgaaggtataaacaagaagctacgccggcgccacccccatgtctttgatggtgttaaggcagatagtccagaagaagttaatgaaatttggcaagctattaaagccaaagaaaaagaagaacaaaatgagagaaaggaatga

SEQ ID NO: 2182 - protein, 357 aa, Alloiococcus otitidis
MTKTHAIKIFGLGPSDLDHLSLGIYRRILDQGKIYVRTQDHPVVNELRESGVTIESFDWVYDLYPDSFDQVYDRICQEVLKLAQDKEVLYGVPGHPRVGEQTTVLLEAASDQVQVLGGQSFIDDLFNAVGVDPVEGFQLVDALAVQADDLVTKQHLIVMQVFSSLVAGDLKLTLMDQYPDEHPVYLVDAAGGKNQAVYRLPLAKIDHFEGVHNLRTLYVPPLDRDDRSRSFATLLSYTDEIMGPGGDAWIKEKSSKDLIPYLKEETAELVAAIEAENDDNIVEELGDLLMQVVYQAKLGEQESYFSIEDVLEGINKKLRRRHPHVFDGVKADSPEEVNEIWQAIKAKEKEEQNERKE

SEQ ID NO: 2183 - DNA, 1134 bp, Alloiococcus otitidis; identical to SEQ ID NO: 2181
  CDS (28)..(1131)

SEQ ID NO: 2184 - protein, 368 aa, Alloiococcus otitidis
MQKYSRKLEAIMTKTHAIKIFGLGPSDLDHLSLGIYRRILDQGKIYVRTQDHPVVNELRESGVTIESFDWVYDLYPDSFDQVYDRICQEVLKLAQDKEVLYGVPGHPRVGEQTTVLLEAASDQVQVLGGQSFIDDLFNAVGVDPVEGFQLVDALAVQADDLVTKQHLIVMQVFSSLVAGDLKLTLMDQYPDEHPVYLVDAAGGKNQAVYRLPLAKIDHFEGVHNLRTLYVPPLDRDDRSRSFATLLSYTDEIMGPGGDAWIKEKSSKDLIPYLKEETAELVAAIEAENDDNIVEELGDLLMQVVYQAKLGEQESYFSIEDVLEGINKKLRRRHPHVFDGVKADSPEEVNEIWQAIKAKEKEEQNERKE

SEQ ID NO: 2185 - DNA, 405 bp, Alloiococcus otitidis
  CDS (115)..(402)
acaagaagctacgccggcgccacccccatgtctttgatggtgttaaggcagatagtccagaagaagttaatgaaatttggcaagctattaaagccaaagaaaaagaagaacaaaatgagagaaaggaatgagcctatgcggttggataaatttttaaaggtctcccggattattaaacggcggactatcgccaaggagattgctgaccaagaccggatcaaggtcaatggccagcttgccaagtcctcgaccaaattaaaagtagctgacgagatagagattgaatttggcaacaagaccttaaaagtaagggtagattccctgcaagacactaccaaaaaagctgaagctgacagcttgtatacagtccttgaagaaagctacaagcgagactattcaaattaa

SEQ ID NO: 2186 - protein, 96 aa, Alloiococcus otitidis
MRERNEPMRLDKFLKVSRIIKRRTIAKEIADQDRIKVNGQLAKSSTKLKVADEIEIEFGNKTLKVRVDSLQDTTKKAEADSLYTVLEESYKRDYSN

SEQ ID NO: 2187 - DNA, 483 bp, Alloiococcus otitidis
  CDS (91)..(480)
ggagccaggcctatgaaagagacgaaaactgggaaggtgacccacttaaacaacccttatacaagtgaatataacctgcagcaggacctgttgcgaaaacgcaggacctatttgaagcgacgtttggcctttattatggtggtaggtttgatcttacttgctataccaggcctgcccttggtcaagaattatttccaggtccaagattacaaagcgcaagaggcccaggctcaagaagatttagaaacattgcaagcccaccaagaagatttggcctattatgtggacttgttaagtgatgaggaatacttagccaagctggcccgaagtgagtattatctaggcgaagatgaggatattatctttaacctacctgaagactatattccagaccaccaacgggtaattgatgacttccaagaaaaagaagaggcaaggcaggaagaccaacaaaaagctgacccagaaccagaagattcctaa

SEQ ID NO: 2188 - protein, 130 aa, Alloiococcus otitidis
MRKRRTYLKRRLAFIMVVGLILLAIPGLPLVKNYFQVQDYKAQEAQAQEDLETLQAHQEDLAYYVDLLSDEEYLAKLARSEYYLGEDEDIIFNLPEDYIPDHQRVIDDFQEKEEARQEDQQKADPEPEDS

SEQ ID NO: 2189 - DNA, 483 bp, Alloiococcus otitidis; identical to SEQ ID NO: 2187
  CDS (13)..(480)

SEQ ID NO: 2190 - protein, 156 aa, Alloiococcus otitidis
MKETKTGKVTHLNNPYTSEYNLQQDLLRKRRTYLKRRLAFIMVVGLILLAIPGLPLVKNYFQVQDYKAQEAQAQEDLETLQAHQEDLAYYVDLLSDEEYLAKLARSEYYLGEDEDIIFNLPEDYIPDHQRVIDDFQEKEEARQEDQQKADPEPEDS

SEQ ID NO: 2191 - DNA, 846 bp, Alloiococcus otitidis
  CDS (16)..(843)
gactcctcctttagcatggcttttccaattttgacacctaaaaataatagattaaaaaggagcatcttcatgtgtttgctagcattttcgattcacaaccaccctaactacccctttatactggtttccaatcgggatgaggcttacgatcggtcggcagttcccctccacacctggctcaactaccctgaagtaacgggtggtttagacttgaaagaaaaggggacttggttgggctataccaagcaaggcaaattcgccactctcttaaaccaccccttcacggactggcaaccagacttagacccaccccggtcaagaggtcacttgctgaaagattatttgacccatgactttggacccggcgaatttgaaagggttttaaaagcttcccgccggcgctataatagctaccacctcttgtatggtagttttgatgacttgcattattatacaaatgcaggcgataaaagctttcgctaccaaccgggtttgtatagcctggccaacactcaagatgatttaagccggcaccggttagacaagtcggcctgcttattaaaagactacctagctagccatgagggagacattagacttgaagatttaacccaattgatgactgaccaagaacaggccaaaactttaccaaacctgcctccctcactgagtcccgaaacagccaaggagcggtcctcgatctttatcaagggtgaagaatttggcacagttgccacaacggcccttttagtagaccaggcaggcatcatctcggttagggaagtaaggtatgaccagaccggggttaccgaagtgacagaaaaggtccaacgattaaccctttaa

SEQ ID NO: 2192 - protein, 276 aa, Alloiococcus otitidis
MAFPILTPKNNRLKRSIFMCLLAFSIHNHPNYPFILVSNRDEAYDRSAVPLHTWLNYPEVTGGLDLKEKGTWLGYTKQGKFATLLNHPFTDWQPDLDPPRSRGHLLKDYLTHDFGPGEFERVLKASRRRYNSYHLLYGSFDDLHYYTNAGDKSFRYQPGLYSLANTQDDLSRHRLDKSACLLKDYLASHEGDIRLEDLTQLMTDQEQAKTLPNLPPSLSPETAKERSSIFIKGEEFGTVATTALLVDQAGIISVREVRYDQTGVTEVTEKVQRLTL

SEQ ID NO: 2193 - DNA, 483 bp, Alloiococcus otitidis
  CDS (46)..(480)
catgctatacttatatcaaatattttaggaggatatgggagaaacatgtctattgaagttggtagtattgtcgagggtaaggttactggtatagcaaaatttggagcatttgtggacttgggcggtggccaaaatggtctcgtccatattagtgagatttccgacaagtatgttgaggatatccacaaggaactcgacaagggccagaccgttaaagtcaaagtcctgtcaattgctgatgatggcaaaatcgccctgtctatccgcaaggcccaggcaaatgctggccaagaccaagccaaggccaaggaagaacaaaaagaggaagttggttccaagtccaacctttacaagaagcgaaataataagaaagactttgatgcgatgatgaactccttcttaaaggatagcgaggaccgtttatcatccctacgtaaaaacactgaaggcaagcggggtggccgtggcagtcgccgaagctaa

SEQ ID NO: 2194 - protein, 145 aa, Alloiococcus otitidis
MSIEVGSIVEGKVTGIAKFGAFVDLGGGQNGLVHISEISDKYVEDIHKELDKGQTVKVKVLSIADDGKIALSIRKAQANAGQDQAKAKEEQKEEVGSKSNLYKKRNNKKDFDAMMNSFLKDSEDRLSSLRKNTEGKRGGRGSRRS

SEQ ID NO: 2195 - DNA, 1428 bp, Alloiococcus otitidis
  CDS (16)..(1425)
caaggtggctttaacatgaacttgattgaatcgatcgaaaataacatagttaaaaaccacttgtggaccaaagatgatagcttactacttgcagtctcaggtggggtggattccgttgtccttctttatgccttaggggaattggctgaccgttttcaacctgctaagataggggtggcccatgtcaaccatatgacccggccagggacccaggcggaagaagctggggtccggcagatggcaaattccttcaattatcctgtttatgtgaaaagatggcaagacaagccaggcaagggaaactttgaagaccaggctaggacctttcgttacaagttttttaggcaagtaatggagtcagaaggctatagccacttgctgacagcccaccacttggacgaccaggctgaaacgattttaatgaagctggttcgaggtggcttgttagaagataaacaggggatcctgatgaaaagaaagtgggccggctttgacctggtccgtcccttgttggagattagtaaggcagacatttaccagtttgctcaggattgtggcttgacctactttgaagacgagtccaaccacagaccaagctacttacgtaaccggctccgccaaggggttcttccccaattaaagcaggaaaatgaccaggccttgacccacttggctgactttgctaaggatttaagggacttgacccagctggcccaggagacgctggaccgagttaaggcagacttagtggacgacacagaagagggcgacttaaccttctccattccagcctttctcgacttgcaaccggcccttcagcgttttttacttcaagatcttttaaaggaagtctttcaccaaagcaagtcctttaaaaaagactatatcgatttgattttaaactggttgcgagagggcaaggttaacagttcacttgacctagcccgaccttggcaagtttacaaaacttatgatcaattttatttgcgtagagtagggcaggaaaaaactcagtctggatcgaaaaagggtcaagggcaaacttactatcttactttaaaccagtgggtccaggttagtcccaatgaaaaaattggcttttttgaagccgaccaccccgtaataaaaaaggccgaccttgtcctagctattcccaaggctagtctacacctgcctattctagcccgccaccgaaaagctggagacaagatgacctataggggtggggaaggccacaaaaagatcaaagatatctttatcaaccagaaggtcccaagccttgatcgggaccaagcctggctgcttgaggatgctagagggcaaattctttggttaattggctatcaaggttgtcagttgtctaatgatgctataactgataaaataaactacatatttgtttacaagcaaatgccgacggaggggtag

SEQ ID NO: 2196 - protein, 470 aa, Alloiococcus otitidis
MNLIESIENNIVKNHLWTKDDSLLLAVSGGVDSVVLLYALGELADRFQPAKIGVAHVNHMTRPGTQAEEAGVRQMANSFNYPVYVKRWQDKPGKGNFEDQARTFRYKFFRQVMESEGYSHLLTAHHLDDQAETILMKLVRGGLLEDKQGILMKRKWAGFDLVRPLLEISKADIYQFAQDCGLTYFEDESNHRPSYLRNRLRQGVLPQLKQENDQALTHLADFAKDLRDLTQLAQETLDRVKADLVDDTEEGDLTFSIPAFLDLQPALQRFLLQDLLKEVFHQSKSFKKDYIDLILNWLREGKVNSSLDLARPWQVYKTYDQFYLRRVGQEKTQSGSKKGQGQTYYLTLNQWVQVSPNEKIGFFEADHPVIKKADLVLAIPKASLHLPILARHRKAGDKMTYRGGEGHKKIKDIFINQKVPSLDRDQAWLLEDARGQILWLIGYQGCQLSNDAITDKINYIFVYKQMPTEG

SEQ ID NO: 2197 - DNA, 591 bp, Alloiococcus otitidis
  CDS (46)..(588)
actacatatttgtttacaagcaaatgccgacggaggggtagaggaatgaccatacatgatgatttagctgaagtcttagtgacaaaagaagagatttcagcccaaaataaagaactaggtaaaattttaaaagaagaatacaaggataaaaacccgcttctggtaggggtcttaaagggggccctcccatttatgggtgacttgatccaggagctcgatatttatttggaatacgatatgatggatgtttctagttatggcaaccaactttcttcctcaggagaagttagaattgataaggacttgggaacatcggttgaaggccgtcaccttctttttgtcgaagatattattgataccggacggaccctcaagtacttaaaagaactcatgcatagacggggggcagcttcagttaagattgttaccctattggataaaactgacaaccgggaagtggatattgaagctgattgggttggctttacggtccctcaaaaatttgtcgtgggttatggcttggactttaaagactgttaccgcaacctcccctacattggagtattgaaagaagaattttacgcaaattaa

SEQ ID NO: 2198 - protein, 181 aa, Alloiococcus otitidis
MTIHDDLAEVLVTKEEISAQNKELGKILKEEYKDKNPLLVGVLKGALPFMGDLIQELDIYLEYDMMDVSSYGNQLSSSGEVRIDKDLGTSVEGRHLLFVEDIIDTGRTLKYLKELMHRRGAASVKIVTLLDKTDNREVDIEADWVGFTVPQKFVVGYGLDFKDCYRNLPYIGVLKEEFYAN

SEQ ID NO: 2199 - DNA, 591 bp, Alloiococcus otitidis; identical to SEQ ID NO: 2197
  CDS (10)..(588)

SEQ ID NO: 2200 - protein, 193 aa, Alloiococcus otitidis
MFTSKCRRRGRGMTIHDDLAEVLVTKEEISAQNKELGKILKEEYKDKNPLLVGVLKGALPFMGDLIQELDIYLEYDMMDVSSYGNQLSSSGEVRIDKDLGTSVEGRHLLFVEDIIDTGRTLKYLKELMHRRGAASVKIVTLLDKTDNREVDIEADWVGFTVPQKFVVGYGLDFKDCYRNLPYIGVLKEEFYAN

SEQ ID NO: 2201 - DNA, 294 bp, Alloiococcus otitidis
  CDS (64)..(291)
ctggggaagctagggtgccattttactccatttctggttcagaattcgttgaaatgtttgttggtgtcggtgccagtcgtgtccgagacctctttgaaaatgctaagaaaaattcgcccgctattatctttattgacgagatcgatgcagtcggtcggcaacgtggagccggtatgggaggcggccacgatgagcgtgagcagacccttaaccaactcctggttgaaatggatggttttgacggtaacgaagggattattgtcatggcggcaaccaaccgtcaagacgtcttag

SEQ ID NO: 2202 - protein, 76 aa, Alloiococcus otitidis
MSVPVVSETSLKMLRKIRPLLSLLTRSMQSVGNVEPVWEAATMSVSRPLTNSWLKWMVLTVTKGLLSWRQPTVKTS

SEQ ID NO: 2203 - DNA, 294 bp, Alloiococcus otitidis; identical to SEQ ID NO: 2201
  CDS (49)..(291)

SEQ ID NO: 2204 - protein, 81 aa, Alloiococcus otitidis
MKCLLVSVPVVSETSLKMLRKIRPLLSLLTRSMQSVGNVEPVWEAATMSVSRPLTNSWLKWMVLTVTKGLLSWRQPTVKTS

SEQ ID NO: 2205 - DNA, 2298 bp, Alloiococcus otitidis
  CDS (40)..(2295)
atttacatatattttatatgtttagacttggaggaagacatgaataaaaaattttataatagtggattcttctatattctggtttttattgctgtgattgggattgcatactgggctatcggtgatgacacggtgggccagacggaaaatgtaagctcaacagaatttgtaaattaccttgaagaagaccaggtagaagaatttagtatccaacccaaaggctctacctatgaagttacggggaccttccgtaacggccaagagcctgaagtaaatgaagaagacacgaccatctttggtcaagctgaccgcaatatcagtgagtttaccactaacattatccgtaatgacgtggttgttgatgaggtctataacctggctaaggataatgatgttgatacggttaccatggaagaggccacaactggcgtttgggccagcttgcttttaaccttcctaccaatgatcatcttgatcggctttttctactttatcatgggtcgaggccaaagcggcggcggtggtcggggtgtgatgaacttcggcaagtctcaagccaagcagactgaccctgaaaaaagtaaagtccgcttttctgatgtagctggggcagatgaagagaaagctgaattagtcgaaattgtcgaattcttgaaagaccctaaacgtttcggcaacctcggtgcccgcattccagccggcgtccttttagagggcccccctgggactggtaaaaccctcctagctaaggccgtagctggggaagctagggtgccattttactccatttctggttcagaattcgttgaaatgtttgttggtgtcggtgccagtcgtgtccgagacctctttgaaaatgctaagaaaaattcgcccgctattatctttattgacgagatcgatgcagtcggtcggcaacgtggagccggtatgggaggcggccacgatgagcgtgagcagacccttaaccaactcctggttgaaatggatggttttgacggtaacgaagggattattgtcatggcggcaaccaaccgtcaagacgtcttagaccctgccctcctccgtccaggtcggtttgaccgtcgcatcctagttggtagcccggacgttaaaggccgtgaagctatcttgaatgtccacgctaaggacaaaccgattgcagacgatgtagatctcaaattaatcgccaagcaaacgccaggcttctccggggcagacttggagaacttgctgaacgaagcagccttgatcgctgcccgtcgtcgaagtaagattatcgaagccgtggacatggatgaagcccatgaccgggttattgctggaccggctaagaaagaccgggttatctctgacaagcaaagacggatggtggccttccacgaagctggccacaccattgttggtatggtcttaagtgatgcccgcgttgtccacaaggtgaccattgtccctcggggtcgtgcaggtggttatgccatcatgttacctaaggaagaccagtacttggtcactaaggaagaattgtttgaacagattgtcggcctgctcggtggacggacttctgaagagatcttcttcaattcccaaactactggggcctccaacgacttccaacaagcaacccaaattgcccgggctatggtaacccaatatgggatgagtaccaagcttggacctgtgcaatacgagagtgatgacaaggtctttatgggccgcgactatgggtccaacccatccttctcccaacaattcgcttctgacattgatgcagaagtgctgaacttaatgaatgaagctcacaagaaagcccacgaaattatcagccagcactcagagcaattgaccctcatcgctgagaaattgcttgaagtggaaactcttgatgccaatgaaatcaagtccttgttcgaaaccggcaaaatgccagagaaaagctcacaggctgacaagtatccacgagaaaacaaagagcaagaacacattgccaatgacgatgaacaaatcggaacttcttatgaagaaatcaaggctgcccaggccgatgctgataagcaggataaagaacgcttgggtgaagataacctctataccgacgaagactccacaccagaagaggttaaagaaggccaggaagattctgaagaagctaaagaccaagagtctagttcagaaaatgattcagaagaaagccatactggtgaaaataacccaaaccagtcaagtgaagcttcttcagatggagaccgtgagtcagacaagcaaggatcagagtccgaccaagaaaatgaagactag

SEQ ID NO: 2206 - protein, 752 aa, Alloiococcus otitidis
MNKKFYNSGFFYILVFIAVIGIAYWAIGDDTVGQTENVSSTEFVNYLEEDQVEEFSIQPKGSTYEVTGTFRNGQEPEVNEEDTTIFGQADRNISEFTTNIIRNDVVVDEVYNLAKDNDVDTVTMEEATTGVWASLLLTFLPMIILIGFFYFIMGRGQSGGGGRGVMNFGKSQAKQTDPEKSKVRFSDVAGADEEKAELVEIVEFLKDPKRFGNLGARIPAGVLLEGPPGTGKTLLAKAVAGEARVPFYSISGSEFVEMFVGVGASRVRDLFENAKKNSPAIIFIDEIDAVGRQRGAGMGGGHDEREQTLNQLLVEMDGFDGNEGIIVMAATNRQDVLDPALLRPGRFDRRILVGSPDVKGREAILNVHAKDKPIADDVDLKLIAKQTPGFSGADLENLLNEAALIAARRRSKIIEAVDMDEAHDRVIAGPAKKDRVISDKQRRMVAFHEAGHTIVGMVLSDARVVHKVTIVPRGRAGGYAIMLPKEDQYLVTKEELFEQIVGLLGGRTSEEIFFNSQTTGASNDFQQATQIARAMVTQYGMSTKLGPVQYESDDKVFMGRDYGSNPSFSQQFASDIDAEVLNLMNEAHKKAHEIISQHSEQLTLIAEKLLEVETLDANEIKSLFETGKMPEKSSQADKYPRENKEQEHIANDDEQIGTSYEEIKAAQADADKQDKERLGEDNLYTDEDSTPEEVKEGQEDSEEAKDQESSSENDSEESHTGENNPNQSSEASSDGDRESDKQGSESDQENED

SEQ ID NO: 2207 - DNA, 2298 bp, Alloiococcus otitidis; identical to SEQ ID NO: 2205
  CDS (28)..(2295)

SEQ ID NO: 2208 - protein, 756 aa, Alloiococcus otitidis
MEEDMNKKFYNSGFFYILVFIAVIGIAYWAIGDDTVGQTENVSSTEFVNYLEEDQVEEFSIQPKGSTYEVTGTFRNGQEPEVNEEDTTIFGQADRNISEFTTNIIRNDVVVDEVYNLAKDNDVDTVTMEEATTGVWASLLLTFLPMIILIGFFYFIMGRGQSGGGGRGVMNFGKSQAKQTDPEKSKVRFSDVAGADEEKAELVEIVEFLKDPKRFGNLGARIPAGVLLEGPPGTGKTLLAKAVAGEARVPFYSISGSEFVEMFVGVGASRVRDLFENAKKNSPAIIFIDEIDAVGRQRGAGMGGGHDEREQTLNQLLVEMDGFDGNEGIIVMAATNRQDVLDPALLRPGRFDRRILVGSPDVKGREAILNVHAKDKPIADDVDLKLIAKQTPGFSGADLENLLNEAALIAARRRSKIIEAVDMDEAHDRVIAGPAKKDRVISDKQRRMVAFHEAGHTIVGMVLSDARVVHKVTIVPRGRAGGYAIMLPKEDQYLVTKEELFEQIVGLLGGRTSEEIFFNSQTTGASNDFQQATQIARAMVTQYGMSTKLGPVQYESDDKVFMGRDYGSNPSFSQQFASDIDAEVLNLMNEAHKKAHEIISQHSEQLTLIAEKLLEVETLDANEIKSLFETGKMPEKSSQADKYPRENKEQEHIANDDEQIGTSYEEIKAAQADADKQDKERLGEDNLYTDEDSTPEEVKEGQEDSEEAKDQESSSENDSEESHTGENNPNQSSEASSDGDRESDKQGSESDQENED

SEQ ID NO: 2209 - DNA, 492 bp, Alloiococcus otitidis
  CDS (40)..(489)
ccctcatcgctgagaaattgcttgaagtggaaactcttgatgccaatgaaatcaagtccttgttcgaaaccggcaaaatgccagagaaaagctcacaggctgacaagtatccacgagaaaacaaagagcaagaacacattgccaatgacgatgaacaaatcggaacttcttatgaagaaatcaaggctgcccaggccgatgctgataagcaggataaagaacgcttgggtgaagataacctctataccgacgaagactccacaccagaagaggttaaagaaggccaggaagattctgaagaagctaaagaccaagagtctagttcagaaaatgattcagaagaaagccatactggtgaaaataacccaaaccagtcaagtgaagcttcttcagatggagaccgtgagtcagacaagcaaggatcagagtccgaccaagaaaatgaagactagaaggatcttgcctctagggacaagcaaagcaattgcttga

SEQ ID NO: 2210 - protein, 150 aa, Alloiococcus otitidis
MPMKSSPCSKPAKCQRKAHRLTSIHEKTKSKNTLPMTMNKSELLMKKSRLPRPMLISRIKNAWVKITSIPTKTPHQKRLKKARKILKKLKTKSLVQKMIQKKAILVKITQTSQVKLLQMETVSQTSKDQSPTKKMKTRRILPLGTSKAIA

SEQ ID NO: 2211 - DNA, 492 bp, Alloiococcus otitidis; identical to SEQ ID NO: 2209
  CDS (22)..(489)

SEQ ID NO: 2212 - protein, 156 aa, Alloiococcus otitidis
MKWKLLMPMKSSPCSKPAKCQRKAHRLTSIHEKTKSKNTLPMTMNKSELLMKKSRLPRPMLISRIKNAWVKITSIPTKTPHQKRLKKARKILKKLKTKSLVQKMIQKKAILVKITQTSQVKLLQMETVSQTSKDQSPTKKMKTRRILPLGTSKAIA

SEQ ID NO: 2213 - DNA, 903 bp, Alloiococcus otitidis
  CDS (91)..(900)
tttaaaggagagaaaattgtggcagataaattgctgaaagctttagcctataatgatgaaattcgtatttatgttgccgatgcaactgacatggttgctgaagcccaaagacgccatgatacttggaacactgctacggcagctttaggtcgggctatgattgggaccagtttactagctgctggtgaaaaaggggacgtctttttaacagtccgaattgaaggaaatggtcctgccggttaccttctggttgacggcaatgccaagggggatattaaggcctatatccaaaacccccatgttagcctccctcttaatgacaagggtaagttagatgttaaaggggcaattggggaccatggtagcctgactgtaaccaaagatatcggtatgagagaaccctttgtgggtcaagtccccctaattagtggtgagttgggtgaagactttaccttctacttggccaattcggaacagattgcttcttcagtggggctgtcagttttggttgatacagacgataccgttcggacagcaggaggctttatgatccaagtcctaccaggggctagcccccaaacgattgaccaattagaagccaccatccaaggcttgcccttgatttctaaaatgatggacaagggtaagagccctgaggaactattggctattctagcaggccatgataactaccggattgttgacgaaatggatatccaattcaaatgcaattgctctaaagaacgttttgctaattccctggtttccttgggggaagaggacatcaaagaaatgattgaagaagacggtggggcagaggcagtttgtcatttctgccgccgaagctaccaattttccaaagaagacctagaagaaatccttgaggaaatgcaagaagcataa

SEQ ID NO: 2214 - protein, 270 aa, Alloiococcus otitidis
MVAEAQRRHDTWNTATAALGRAMIGTSLLAAGEKGDVFLTVRIEGNGPAGYLLVDGNAKGDIKAYIQNPHVSLPLNDKGKLDVKGAIGDHGSLTVTKDIGMREPFVGQVPLISGELGEDFTFYLANSEQIASSVGLSVLVDTDDTVRTAGGFMIQVLPGASPQTIDQLEATIQGLPLISKMMDKGKSPEELLAILAGHDNYRIVDEMDIQFKCNCSKERFANSLVSLGEEDIKEMIEEDGGAEAVCHFCRRSYQFSKEDLEEILEEMQEA

SEQ ID NO: 2215 - DNA, 903 bp, Alloiococcus otitidis; identical to SEQ ID NO: 2213
  CDS (31)..(900)

SEQ ID NO: 2216 - protein, 290 aa, Alloiococcus otitidis
MLKALAYNDEIRIYVADATDMVAEAQRRHDTWNTATAALGRAMIGTSLLAAGEKGDVFLTVRIEGNGPAGYLLVDGNAKGDIKAYIQNPHVSLPLNDKGKLDVKGAIGDHGSLTVTKDIGMREPFVGQVPLISGELGEDFTFYLANSEQIASSVGLSVLVDTDDTVRTAGGFMIQVLPGASPQTIDQLEATIQGLPLISKMMDKGKSPEELLAILAGHDNYRIVDEMDIQFKCNCSKERFANSLVSLGEEDIKEMIEEDGGAEAVCHFCRRSYQFSKEDLEEILEEMQEA

SEQ ID NO: 2217 - DNA, 903 bp, Alloiococcus otitidis; identical to SEQ ID NO: 2213
  CDS (19)..(900)

SEQ ID NO: 2218 - protein, 294 aa, Alloiococcus otitidis
MADKLLKALAYNDEIRIYVADATDMVAEAQRRHDTWNTATAALGRAMIGTSLLAAGEKGDVFLTVRIEGNGPAGYLLVDGNAKGDIKAYIQNPHVSLPLNDKGKLDVKGAIGDHGSLTVTKDIGMREPFVGQVPLISGELGEDFTFYLANSEQIASSVGLSVLVDTDDTVRTAGGFMIQVLPGASPQTIDQLEATIQGLPLISKMMDKGKSPEELLAILAGHDNYRIVDEMDIQFKCNCSKERFANSLVSLGEEDIKEMIEEDGGAEAVCHFCRRSYQFSKEDLEEILEEMQEA

SEQ ID NO: 2219 - DNA, 513 bp, Alloiococcus otitidis
  CDS (82)..(510)
ccttcaggatcggatataaaaaatacaggcagggatacttgcctaaaaacttctaccctatctaattcaaaggaggctaatatgaaaaaaaccattgaatcgatgcgacagatggctagtttagtggttaagagcttagggctttattggtcatcgtcaaaaacatataccatagctcttctactagtcattcctggccagggcctaattcttccgtttagtcttttgatatctagaagtttggtcaaccaaataagtctagaagtcaatggctcgggcaatgtcattgtccttctctttttgctttggctttttcttagcttagtccagtcctgcttaaggcctttagaaatggtgtttcagggtttgatgactgaccagatgattgctcacattaatcaaaatttgatggccaaggcatctaatttaaaaggattagcttattttgaagaccctggtttttatgatgatatacagctacttggcgaagcaagcgggttggcgcccggttaa

SEQ ID NO: 2220 - protein, 143 aa, Alloiococcus otitidis
MKKTIESMRQMASLVVKSLGLYWSSSKTYTIALLLVIPGQGLILPFSLLISRSLVNQISLEVNGSGNVIVLLFLLWLFLSLVQSCLRPLEMVFQGLMTDQMIAHINQNLMAKASNLKGLAYFEDPGFYDDIQLLGEASGLAPG

SEQ ID NO: 2221 - DNA, 450 bp, Alloiococcus otitidis
  CDS (1)..(447)
ttggtaactggaattgctattctcatcattttggcttcatataccccttggctgcctctttttattttcctagccattcttccccaggttctagttagctatcgattgcaaagggaggcttttgaaagtttggttacgaaaagtccagaagctcgtaagatgaactactaccggtcagccgtattgactaaagactttgtcaaagaaagtaaactttacaatttgggttctttctttatagacaagtatgagtcagcttttaaagtaggtcaagcagatgtcaaacgagtacactataagcaattaaccgtgtccttaatctttagcctaataggaacggctggtattgctttggctttttggtggatgatccgtcagtctttatctaggcaagtaaagcctggagacattttagtctttttatcctcccctatttatggcttgggatag

SEQ ID NO: 2222 - protein, 149 aa, Alloiococcus otitidis
MVTGIAILIILASYTPWLPLFIFLAILPQVLVSYRLQREAFESLVTKSPEARKMNYYRSAVLTKDFVKESKLYNLGSFFIDKYESAFKVGQADVKRVHYKQLTVSLIFSLIGTAGIALAFWWMIRQSLSRQVKPGDILVFLSSPIYGLG

SEQ ID NO: 2223 - DNA, 600 bp, Alloiococcus otitidis
  CDS (22)..(597)
tctttttatcctcccctatttatggcttgggatagcctgacgagtctggtcgaagaatcgacccttctttacgatacacttttgtatatggaaagatacttccgtttcctgactcttccttccgacgtgccgaaaggtaaccagccccttttaactaacaatagacaagaatttacaattgggtttaagggagttgatttcaaatacccccatgcggaccgtaatgtattaaaaaattttaacctgacgatcaaaaaaggagaccgcctcgcccttattggtgaaaatggggcaggtaaaacaactttgatcaaactattgactcgtttctatattcctgataaggggaagatcatgttaaatggtcaggatattcagaagattcaaatcgaagattatcgaaaattattgacagtggttttccaagacccggctcattacccactcactttagctgaaaatatccggctatccaagttggacaaggagaatagttccttttggctaaagcaagctgtccaatttgctggtctaacagaaattgtaaaacattctgataagggccttgaccaaatcttaaccaatgattttgaagggtga

SEQ ID NO: 2224 - protein, 192 aa, Alloiococcus otitidis
MAWDSLTSLVEESTLLYDTLLYMERYFRFLTLPSDVPKGNQPLLTNNRQEFTIGFKGVDFKYPHADRNVLKNFNLTIKKGDRLALIGENGAGKTTLIKLLTRFYIPDKGKIMLNGQDIQKIQIEDYRKLLTVVFQDPAHYPLTLAENIRLSKLDKENSSFWLKQAVQFAGLTEIVKHSDKGLDQILTNDFEG

SEQ ID NO: 2225 - DNA, 345 bp, Alloiococcus otitidis
  CDS (70)..(342)
agagacttgtcaggtgggcagtggcaagctatttcgctggcccgggcttactatagaaatagtggtctgatggtgtttgatgaaccttcagcttctttagatgccacgcatgaagaccacttcatccagtccatgtctcatatgagtcaggatcagactcttctcttagtaacccaccgtttttctgccttgaagttagtggatcgtgctgtttacttagaagggtgccaagtcaaggaagatggttgcctgaaggacttgatcaaagacaaaaaacacgtgtttcacagatcttccaacttcaagctgacaaatatcaaattgactaaatttttcttgacttaa

SEQ ID NO: 2226 - protein, 91 aa, Alloiococcus otitidis
MVFDEPSASLDATHEDHFIQSMSHMSQDQTLLLVTHRFSALKLVDRAVYLEGCQVKEDGCLKDLIKDKKHVFHRSSNFKLTNIKLTKFFLT

SEQ ID NO: 2227 - DNA, 345 bp, Alloiococcus otitidis; identical to SEQ ID NO: 2225
  CDS (7)..(342)

SEQ ID NO: 2228 - protein, 112 aa, Alloiococcus otitidis
MSGGQWQAISLARAYYRNSGLMVFDEPSASLDATHEDHFIQSMSHMSQDQTLLLVTHRFSALKLVDRAVYLEGCQVKEDGCLKDLIKDKKHVFHRSSNFKLTNIKLTKFFLT

SEQ ID NO: 2229 - DNA, 1068 bp, Alloiococcus otitidis
  CDS (34)..(1065)
gataaagcttgtctgaataattggaatggaaagatgaggctaaaatttgtgtggaaaataggagatattgaaatagacaaccagatcgtggtggcccccatggctggtgtgaccaattcggcttttcgaacaatcaccaaagaatttggggcaggtttggttgtttgtgaaatgatcagtgataaggccctcattcacggcaatgagaagactttgcggatgctacatattgaagaaaatgagtaccccttgagcatccaaattatggggggcgaagccaagacgatggttgaagcagcccaatttattgaaagagaaacggatgctgctattattgacatcaacatgggttgccctgttcctaaaatcaccaaaaatgattccggatccaagctcttgcttgacccagacaatatttatgacctggtttcccgggtggtggaggcggttgaccttccagtgacagttaaaatgcggactggctgggatgatgaccacctgtggccagttgaaaatgccttggcagctcaaaaggctggggcccaaatgctagccatgcacggccggacccggttgcaaatgtatgatggatcggccaattgggacattttagcccaggtcaaagaagccttgtccattcccttcgttgctaatggggacatccggactccagaagatgtggacaaggcctttgaagtaactggggctgatgccttgatggtgggccgggctgccttagggaacccttggataatcaagcaattaacccactacctggcaactggccaagtcctggatcaacctagtcctagccaggttattgaaactgctaaagaacacttgcggcgtttggttgacctcaaaggacgagtggtggctagcaaggaattccgcaaacatgcttcctactatctcaaaggtttccctggatcagctaaggccaaggtcaaggttaatgaacaaacagacccagacaaggtgattgaaattttggatgctgctggccttgcagcagaggaaaaattagctaaacgacgggccagacgtcaagcccgggccagtcggtaa

SEQ ID NO: 2230 - protein, 344 aa, Alloiococcus otitidis
MRLKFVWKIGDIEIDNQIVVAPMAGVTNSAFRTITKEFGAGLVVCEMISDKALIHGNEKTLRMLHIEENEYPLSIQIMGGEAKTMVEAAQFIERETDAAIIDINMGCPVPKITKNDSGSKLLLDPDNIYDLVSRVVEAVDLPVTVKMRTGWDDDHLWPVENALAAQKAGAQMLAMHGRTRLQMYDGSANWDILAQVKEALSIPFVANGDIRTPEDVDKAFEVTGADALMVGRAALGNPWIIKQLTHYLATGQVLDQPSPSQVIETAKEHLRRLVDLKGRVVASKEFRKHASYYLKGFPGSAKAKVKVNEQTDPDKVIEILDAAGLAAEEKLAKRRARRQARASR

SEQ ID NO: 2231 - DNA, 327 bp, Alloiococcus otitidis
  CDS (16)..(324)
aatggagttaaggaaatgagtcaggataatacttctaatcaaaatactgaaaatttgaatgaccagatgttggtccggcaagaaaaaatgaaaaacttggctgacaagggattagacccttttggtagcaagtttgaccgaaccgattattcagaccagattataagggactatgaaagcttttcgaaagagaactgcaagaaaaagacagccatgtcaccattgcaggccggatcatgtctaaacggggcaagggcaaggctggttttgcccacctcaaggataagaatggtcaggtacaaatctatgtccgccaagacgaaatag

SEQ ID NO: 2232 - protein, 103 aa, Alloiococcus otitidis
MSQDNTSNQNTENLNDQMLVRQEKMKNLADKGLDPFGSKFDRTDYSDQIIRDYESFSKENCKKKTAMSPLQAGSCLNGARARLVLPTSRIRMVRYKSMSAKTK

SEQ ID NO: 2233 - DNA, 1353 bp, Alloiococcus otitidis
  CDS (220)..(1350)
aagcttttcgaaagagaactgcaagaaaaagacagccatgtcaccattgcaggccggatcatgtctaaacggggcaagggcaaggctggttttgcccacctcaaggataagaatggtcaggtacaaatctatgtccgccaagacgaaataggggaagacgattatgaaatttataaatcggctgaccttggtgactttatcggtatttcgggccggattatgaaaactaacaccggagaagtgacagtacgggcccaagaatttacccacctgtctaaggctctcagaccccttccggacaagtaccacggcttaactgatgttgagcagaaatatcgtaaacgttacttggacttaattgccaatgaagctagcctggaccggtttaaaaaacggagtcagattatttcggctatccgcaagcatatggatggcctaggctatttagaagtcgaaacccccttcctccacaaccaggccggaggggcagcagcgagaccctttattacccaccacaatgccttgaacactgacctttacctccggatcgccctagaacttcacttgaaacgcttgattgtcggcggtatggaaaaggtctatgaaattggtcgggtcttccgaaatgaaggaatcgatgccacccacaaccctgaatttaccatgctggaagtctatactgcctaccaagattactgggacgtgatggacctaaccgaagacttgatccggtctgtcgcccaggatgtcaaagggactactgtcattgaatatggggacgagaccatcaacctggaagaaaaatgggaccggaagcatatggtggacttgatcaaggaagagactggtgttgacttttggcaagagatgaccgatgaccaggcccgtcaaattgccaaagaccaccaggttgaagtagaagactatgccgagtatgggcacgtggtcaatgaattctttgaacaatttgtggaagataagctccgccagcccacctttgtctatggccacccaaccgccatctcacctcttgccaagaaaaatcctgaagacggacgctttaccgatcgttttgaactctttattgctggccatgaatatggcaatgcctttaccgagttgaatgacccgattgaccaacgggaaagatttgaagcccaggtcaaagagagacaagccggcaatgatgaagcccatgaggtagacgaagactatcttgagtctatggagtatgggatgccgccaacaggaggattgggaattgggatcgaccgtttagtcatgctcttaacagatgcccacaccatcagggatgttgtcttgttcccaaccatgaagaatattgaccgttaa

SEQ ID NO: 2234 - protein, 377 aa, Alloiococcus otitidis
MKTNTGEVTVRAQEFTHLSKALRPLPDKYHGLTDVEQKYRKRYLDLIANEASLDRFKKRSQIISAIRKHMDGLGYLEVETPFLHNQAGGAAARPFITHHNALNTDLYLRIALELHLKRLIVGGMEKVYEIGRVFRNEGIDATHNPEFTMLEVYTAYQDYWDVMDLTEDLIRSVAQDVKGTTVIEYGDETINLEEKWDRKHMVDLIKEETGVDFWQEMTDDQARQIAKDHQVEVEDYAEYGHVVNEFFEQFVEDKLRQPTFVYGHPTAISPLAKKNPEDGRFTDRFELFIAGHEYGNAFTELNDPIDQRERFEAQVKERQAGNDEAHEVDEDYLESMEYGMPPTGGLGIGIDRLVMLLTDAHTIRDVVLFPTMKNIDR

SEQ ID NO: 2235 - DNA, 1353 bp, Alloiococcus otitidis; identical to SEQ ID NO: 2233
  CDS (61)..(1350)

SEQ ID NO: 2236 - protein, 430 aa, Alloiococcus otitidis
MSKRGKGKAGFAHLKDKNGQVQIYVRQDEIGEDDYEIYKSADLGDFIGISGRIMKTNTGEVTVRAQEFTHLSKALRPLPDKYHGLTDVEQKYRKRYLDLIANEASLDRFKKRSQIISAIRKHMDGLGYLEVETPFLHNQAGGAAARPFITHHNALNTDLYLRIALELHLKRLIVGGMEKVYEIGRVFRNEGIDATHNPEFTMLEVYTAYQDYWDVMDLTEDLIRSVAQDVKGTTVIEYGDETINLEEKWDRKHMVDLIKEETGVDFWQEMTDDQARQIAKDHQVEVEDYAEYGHVVNEFFEQFVEDKLRQPTFVYGHPTAISPLAKKNPEDGRFTDRFELFIAGHEYGNAFTELNDPIDQRERFEAQVKERQAGNDEAHEVDEDYLESMEYGMPPTGGLGIGIDRLVMLLTDAHTIRDVVLFPTMKNIDR

SEQ ID NO: 2237 - DNA, 1269 bp, Alloiococcus otitidis
  CDS (241)..(1266)
agaatgcccaggctacatactgaagaggagtgccgaatgaaaaaaaccagatggattgagtttttaggtggcagtaacttactttacacacttgctgtcatctttttaatttcgttaactattttgattttaaccttggtggattttgtttttacccccatcatcgttattttctctaacattttaatgcccattattatagccgttctgttttactatcttttagacccccttgtctctttgtttgagaagaaaatgtcccgaatgtgggctacttctttagtctttgtcattattttgatcttcttagccgttttggtagccatcttaattccagtcttaagcgaacaaatcgctaacttaattgaaagcttccctgtctttctgaacgatgttttctcaagcatccaagacctcttagctaatttgccagccaatgatttcttcgatactattcttcaaagtttgcaggacttatccaataccttatttgacaacctaggccaaatctttagccaaggcataaccaatgtatccaatgtggtctccagtgttacaaacgttgtttttacccttgggatctttcctgttatcttgtttttcttactaaaagacgaagagaaaataattaagggcctcctgtttgtgactccaccgacctggcggaagagtttgatccggattggggcggaagtcaacttgcaagtaggggcctacattaagggccagttgattgtggctattgccaatggggtgatgatgtttgtcggctttaccttaattggcctcaattacgctgttgccctaagtgttttgggcggtttcctctcacttatcccttatattggcccaattttaacctttattcctgctatttttatcgccgcttttgattcctttaccgaagtcctgctattactagtcgtttgggccattatccaatttgccgaagggaacttcatcgaacccaatgttatgggtaaaaggttaaatatccacccggtcaccattattattaccttactggtcatgggagacttgtttggtctcttcggtctagtctttggtatcccaatgtatgccatcttaaaagttattgtcatccacttctacatgatgtttaaatctcgctacaatgaatactttggcgaccgtgctggagaatatgaagtagacagttgggattccaagaaatatggtgacaaggatattctagaaaccaaggatgaatacgtcgaatacctttacaaaaaagaactaaactcataa

SEQ ID NO: 2238 - protein, 342 aa, Alloiococcus otitidis
MFEKKMSRMWATSLVFVIILIFLAVLVAILIPVLSEQIANLIESFPVFLNDVFSSIQDLLANLPANDFFDTILQSLQDLSNTLFDNLGQIFSQGITNVSNVVSSVTNVVFTLGIFPVILFFLLKDEEKIIKGLLFVTPPTWRKSLIRIGAEVNLQVGAYIKGQLIVAIANGVMMFVGFTLIGLNYAVALSVLGGFLSLIPYIGPILTFIPAIFIAAFDSFTEVLLLLVVWAIIQFAEGNFIEPNVMGKRLNIHPVTIIITLLVMGDLFGLFGLVFGIPMYAILKVIVIHFYMMFKSRYNEYFGDRAGEYEVDSWDSKKYGDKDILETKDEYVEYLYKKELNS

SEQ ID NO: 2239 - DNA, 1269 bp, Alloiococcus otitidis; identical to SEQ ID NO: 2237
  CDS (37)..(1266)

SEQ ID NO: 2240 - protein, 410 aa, Alloiococcus otitidis
MKKTRWIEFLGGSNLLYTLAVIFLISLTILILTLVDFVFTPIIVIFSNILMPIIIAVLFYYLLDPLVSLFEKKMSRMWATSLVFVIILIFLAVLVAILIPVLSEQIANLIESFPVFLNDVFSSIQDLLANLPANDFFDTILQSLQDLSNTLFDNLGQIFSQGITNVSNVVSSVTNVVFTLGIFPVILFFLLKDEEKIIKGLLFVTPPTWRKSLIRIGAEVNLQVGAYIKGQLIVAIANGVMMFVGFTLIGLNYAVALSVLGGFLSLIPYIGPILTFIPAIFIAAFDSFTEVLLLLVVWAIIQFAEGNFIEPNVMGKRLNIHPVTIIITLLVMGDLFGLFGLVFGIPMYAILKVIVIHFYMMFKSRYNEYFGDRAGEYEVDSWDSKKYGDKDILETKDEYVEYLYKKELNS

SEQ ID NO: 2241 - DNA, 1269 bp, Alloiococcus otitidis; identical to SEQ ID NO: 2237
  CDS (4)..(1266)

SEQ ID NO: 2242 - protein, 421 aa, Alloiococcus otitidis
MPRLHTEEECRMKKTRWIEFLGGSNLLYTLAVIFLISLTILILTLVDFVFTPIIVIFSNILMPIIIAVLFYYLLDPLVSLFEKKMSRMWATSLVFVIILIFLAVLVAILIPVLSEQIANLIESFPVFLNDVFSSIQDLLANLPANDFFDTILQSLQDLSNTLFDNLGQIFSQGITNVSNVVSSVTNVVFTLGIFPVILFFLLKDEEKIIKGLLFVTPPTWRKSLIRIGAEVNLQVGAYIKGQLIVAIANGVMMFVGFTLIGLNYAVALSVLGGFLSLIPYIGPILTFIPAIFIAAFDSFTEVLLLLVVWAIIQFAEGNFIEPNVMGKRLNIHPVTIIITLLVMGDLFGLFGLVFGIPMYAILKVIVIHFYMMFKSRYNEYFGDRAGEYEVDSWDSKKYGDKDILETKDEYVEYLYKKELNS

SEQ ID NO: 2243 - DNA, 369 bp, Alloiococcus otitidis
  CDS (184)..(366)
gcggtagcagagccacctttcatttccccagcatgcactgggaaaaccgatgcggtattagcacccgtttccgggtgttatccccctcttatgggcaagttcctcacgtgttactcacccgttcgccactccgcctcttcctgcaagcaggaagatttggcgttcgacttgcatgtattaggcatgccgccagcgttcgtcctgagccaagatcaaactctcgttttaaaagagttcaggttaacacctgttctatcttggttcattgttgttataagttttcaaaaacttataaaagcacttgaattgtctcgctttacaaaggtaaagcttaagacccttgcacttcttggtgtttatcttatttag

SEQ ID NO: 2244 - protein, 61 aa, Alloiococcus otitidis
MPPAFVLSQDQTLVLKEFRLTPVLSWFIVVISFQKLIKALELSRFTKVKLKTLALLGVYLI

SEQ ID NO: 2245 - DNA, 444 bp, Alloiococcus otitidis
  CDS (4)..(441)
tttatgaaaggctctctttttcgctatggcgacttaatagaagctggcttagtcttttttacctgcctgatagtgacggtcatttttgcttttctggatcaaaattttcaaggtgaagcaagctatctggctgaatttgtcttcagtattttagaacaccaagaaacagttgccttagccctaaccctcttagcccttatcttcatttaccaatttattaaacggcggcagcttgaagtccgcctccgcttcttagttggggcgagaataaatatgatccgtttgggctatctttgcctcttgctggcttccttattcacggccttctttctaactatctgcctaggactcctattaagtcttagccttcagcttactatcgaagtctttttattcctattagtatactgccttgtcagcatgatttgggtgagaatcgattga

SEQ ID NO: 2246 - protein, 146 aa, Alloiococcus otitidis
MKGSLFRYGDLIEAGLVFFTCLIVTVIFAFLDQNFQGEASYLAEFVFSILEHQETVALALTLLALIFIYQFIKRRQLEVRLRFLVGARINMIRLGYLCLLLASLFTAFFLTICLGLLLSLSLQLTIEVFLFLLVYCLVSMIWVRID

SEQ ID NO: 2247 - DNA, 1293 bp, Alloiococcus otitidis
  CDS (157)..(1290)
ccttcagcttactatcgaagtctttttattcctattagtatactgccttgtcagcatgatttgggtgagaatcgattgaaaactttaatattttttatcaaggatgtttttttgaagcgctggctcccccttctgggtttccttattgtcctctttatggccaacttgctcttatttacaggagtccggtcacttatatccacctaccaaggctttcgtgaaaatgcatttttgcttcaagatggtatttttattagcaatatagaccctgagaaaaatgcccaggtggattatgaccagattgatcttgaccaaactcaaaaggtctatgactacttagaagaccatacccattacgggattgaaatgtttggttataccactgacctagccaaccaggatgagatggatgtcttggtcaattatgtcaaccagttaggctttcaattaagaccacttccaatcgctgagggagaaagtttaaattttgaggatggaaatcctaaaggggtcttggttggtgctggtctggcccaggattacccgattggttgtcattttgactttgacaaccctgtgactggtcagagggaagaagtatttaccgtagggatcttagagaccaatgcttaccggtcaaacctttacgctttaaattctaaaaattacttcaactatacagttttttatcccctaacccctaactttatccagtcatcaacaaaagaccttcaggtgaacgccctcaatgacctcatcctaacccagtcatccagaaaagaggctgaccaggtgaaagatttgataaaggcaacaaccgggcttagttataatttttttagtcaagctcgtaataccgcctacttccaggactattatagccaatcgattgcctttattttgggcttaactttactcgtgatgattcttgccatctttttggccatctggattaattcggttagtatccgcctagcgataagggatatgaccctccatatgctggtaggcttgacctaccatagactccgcctcatcctctaccagttctatggtatcttgttagccatcgtcatgctagttctaaccttattcacttcttacaatcgctatacgacgatcttccgcaaagatgctatctttgccagtttaggctttctccgcctggttgatatagactgggctgccttaggaattgtattgctggttaacctcctctgcctgcccgtgattgtggaagtcatgatggctaaaatcaagcggaagtcaatctctttgggggtgttcgaatga

SEQ ID NO: 2248 - protein, 378 aa, Alloiococcus otitidis
MANLLLFTGVRSLISTYQGFRENAFLLQDGIFISNIDPEKNAQVDYDQIDLDQTQKVYDYLEDHTHYGIEMFGYTTDLANQDEMDVLVNYVNQLGFQLRPLPIAEGESLNFEDGNPKGVLVGAGLAQDYPIGCHFDFDNPVTGQREEVFTVGILETNAYRSNLYALNSKNYFNYTVFYPLTPNFIQSSTKDLQVNALNDLILTQSSRKEADQVKDLIKATTGLSYNFFSQARNTAYFQDYYSQSIAFILGLTLLVMILAIFLAIWINSVSIRLAIRDMTLHMLVGLTYHRLRLILYQFYGILLAIVMLVLTLFTSYNRYTTIFRKDAIFASLGFLRLVDIDWAALGIVLLVNLLCLPVIVEVMMAKIKRKSISLGVFE

SEQ ID NO: 2249 - DNA, 1293 bp, Alloiococcus otitidis; identical to SEQ ID NO: 2247
  CDS (76)..(1290)

SEQ ID NO: 2250 - protein, 405 aa, Alloiococcus otitidis
MKTLIFFIKDVFLKRWLPLLGFLIVLFMANLLLFTGVRSLISTYQGFRENAFLLQDGIFISNIDPEKNAQVDYDQIDLDQTQKVYDYLEDHTHYGIEMFGYTTDLANQDEMDVLVNYVNQLGFQLRPLPIAEGESLNFEDGNPKGVLVGAGLAQDYPIGCHFDFDNPVTGQREEVFTVGILETNAYRSNLYALNSKNYFNYTVFYPLTPNFIQSSTKDLQVNALNDLILTQSSRKEADQVKDLIKATTGLSYNFFSQARNTAYFQDYYSQSIAFILGLTLLVMILAIFLAIWINSVSIRLAIRDMTLHMLVGLTYHRLRLILYQFYGILLAIVMLVLTLFTSYNRYTTIFRKDAIFASLGFLRLVDIDWAALGIVLLVNLLCLPVIVEVMMAKIKRKSISLGVFE

SEQ ID NO: 2251 - DNA, 1293 bp, Alloiococcus otitidis; identical to SEQ ID NO: 2247
  CDS (61)..(1290)

SEQ ID NO: 2252 - protein, 410 aa, Alloiococcus otitidis
MGENRLKTLIFFIKDVFLKRWLPLLGFLIVLFMANLLLFTGVRSLISTYQGFRENAFLLQDGIFISNIDPEKNAQVDYDQIDLDQTQKVYDYLEDHTHYGIEMFGYTTDLANQDEMDVLVNYVNQLGFQLRPLPIAEGESLNFEDGNPKGVLVGAGLAQDYPIGCHFDFDNPVTGQREEVFTVGILETNAYRSNLYALNSKNYFNYTVFYPLTPNFIQSSTKDLQVNALNDLILTQSSRKEADQVKDLIKATTGLSYNFFSQARNTAYFQDYYSQSIAFILGLTLLVMILAIFLAIWINSVSIRLAIRDMTLHMLVGLTYHRLRLILYQFYGILLAIVMLVLTLFTSYNRYTTIFRKDAIFASLGFLRLVDIDWAALGIVLLVNLLCLPVIVEVMMAKIKRKSISLGVFE

SEQ ID NO: 2253 - DNA, 684 bp, Alloiococcus otitidis
  CDS (37)..(681)
aatcaagcggaagtcaatctctttgggggtgttcgaatgacacagttaattgaacttagcctaaagcaaaagcgttttaagaaaaataaacgagtcattttaaaggattttcaactttctgtttcagctggggacagtatagcggtcatgggagaatctggtattggcaaaacttccctcctgaatatactaggcctgatcgaccaggattatgaagggagttataaactcttcggtcggtcagccaaggcctattctgccaaagaccaggctcagatgcgaaacaaccgtattggctttatcctccaagaaaatgccctcattccctcgctttcaatcaaggataacatctgtctgccttggctttactgtccgaaagacaagcaggaccaggtattttttgacgagttgatcaggcgtttgaagcttgatgaccttctcagtcaaaaacctggcgaatgttcgggaggtcagcgggcccgggccgttattggacgagcggtcttgatgaagccggacctcatcttggcagatgagccaactgcctccttagatgaggaaaacagacaagaagttttagccatcttaaaggatttaaacagggactttaaggcaagcctcattaccgttacccatgatcacgcagtcgcacaaaaccaccgtaaaattttaaggatggtgtaa

SEQ ID NO: 2254 - protein, 215 aa, Alloiococcus otitidis
MTQLIELSLKQKRFKKNKRVILKDFQLSVSAGDSIAVMGESGIGKTSLLNILGLIDQDYEGSYKLFGRSAKAYSAKDQAQMRNNRIGFILQENALIPSLSIKDNICLPWLYCPKDKQDQVFFDELIRRLKLDDLLSQKPGECSGGQRARAVIGRAVLMKPDLILADEPTASLDEENRQEVLAILKDLNRDFKASLITVTHDHAVAQNHRKILRMV

SEQ ID NO: 2255 - DNA, 156 bp, Alloiococcus otitidis
  CDS (1)..(153)
atgggatttatcgtcatggttttttcatttctttttggaatggcttttgtcgctttcagtattcatttttacagggaaaaccagaataacttctacttgcttttgaccttgctgggaattttgcttattctttttgctgtttacctagctgtctaa

SEQ ID NO: 2256 - protein, 51 aa, Alloiococcus otitidis
MGFIVMVFSFLFGMAFVAFSIHFYRENQNNFYLLLTLLGILLILFAVYLAV

SEQ ID NO: 2257 - DNA, 1017 bp, Alloiococcus otitidis
  CDS (7)..(1014)
aggagaatgatgatgtttcaaggaagaagtttattaaaagaagttgactttacaccagcagaaattgaatacctgattgactttgccatccacttgaaagacttgaaaaaacgacatattccccatgaatacctaaaagggcaaaatattgccttactgttcgaaaaatcttcaacccggacccggtcagcctttacggttgcttgtaatgatttaggagccaatccagaattcttgggtgccaacgatattcaattaggcaagaaagaatccgttgaagactcagccaaggtctttggttccatgtttgatgggattgaattccgcggttttaaacaagaagacgtggagagcttggctaaatactctggtgtgcccgtttggaatggcttgaccgatgaatggcacccaacccagatgattgctgactttatgaccattaaagaagagtttggtgaattgaagggcaaaaaattagtttactgtggtgatggtcggaacaacatggccaactccctagtggtaactgggtctatgcttggtgtggatgtcaccattgcttctccagaggaactcttccccaaacaatctgtgattgattatgctgaaaaatttgcggcagagtcgggctccacagtgaccgttactgccgacattaaagcagcagtgaaagatgcagatgtcctctatacggatgtttgggtctcaatgggggaagaggaccaatttgaagaacggattaacctgctccaaccttaccaggttaacaaagacctcactgatctgattgaaggggactacatcttcatgcactgcttgccagctttccacgatcaagatacccggattggtcgccagatagctgatcaacatgggattaaagaaatggaagttaccgatgaagtcttccgcgacagcaaacatgcgagacagtttacagaagcggaaaaccggatgcactctatcaaggcgattatggcagctaccaacggcaacctgtttattcctaaagtataa

SEQ ID NO: 2258 - protein, 336 aa, Alloiococcus otitidis
MMMFQGRSLLKEVDFTPAEIEYLIDFAIHLKDLKKRHIPHEYLKGQNIALLFEKSSTRTRSAFTVACNDLGANPEFLGANDIQLGKKESVEDSAKVFGSMFDGIEFRGFKQEDVESLAKYSGVPVWNGLTDEWHPTQMIADFMTIKEEFGELKGKKLVYCGDGRNNMANSLVVTGSMLGVDVTIASPEELFPKQSVIDYAEKFAAESGSTVTVTADIKAAVKDADVLYTDVWVSMGEEDQFEERINLLQPYQVNKDLTDLIEGDYIFMHCLPAFHDQDTRIGRQIADQHGIKEMEVTDEVFRDSKHARQFTEAENRMHSIKAIMAATNGNLFIPKV

SEQ ID NO: 2259 - DNA, 972 bp, Alloiococcus otitidis
  CDS (4)..(969)
cttatggcaaggaaaaaaattgtcgttgctctcggtggcaatgccatcttgaccgatgaccccagtgcacaagggcaaaaagcagccctccagtcgacagctcaacagctcgttgctttagtccaaagaggggacgaccttgtgattacccatggcaatggtccccaggttggcaacctcctcttgcaaaacttagcagcagatagtgccgacaatccagcctttgaactggatagtttggtagctatgacccaaggctcaatcggttactggttgcaaaatgccatgcggaatgaactcaatcaattgaggctggacaaagtggtctccacgctggtcacccaggtattggtggacagagatgacccggcctttcaagaccctagtaaacccattggcccttactacactgaagaccaggcgcaagcaaaaatggcccaaagctcagctatctttaaagaagatgctggccggggctggcgtaaggttgtcgcttcaccgactcccctagccattaatgaaattgaaacgattcgaaagctagttgacgaccaacacattgtgattgcctctgggggaggtgggattccagttgtccaaggtcacgaccgaaccttccacggtgttgaagcggttgtcgacaaggatgaggcctcccaaagtttggctagcgcccttgaagctgaccttttcctggttttaaccggggtcgaccatgtctatattaactttaacaaggaagaccaggaaagattagaccaggtcagctatgctgaactggaaaaacacatggctgatggccaatttgctgcaggtagcatgcaacccaaggtccaagcctgcatggactttgtcaaagcaaatcccaatagtcaggcagtgatcacttccttagacaacttggaaaacttcctcaatggtggaagtgggaccctaatccagtatgaagccaaagagtttttagaagcctaa

SEQ ID NO: 2260 - protein, 322 aa, Alloiococcus otitidis
MARKKIVVALGGNAILTDDPSAQGQKAALQSTAQQLVALVQRGDDLVITHGNGPQVGNLLLQNLAADSADNPAFELDSLVAMTQGSIGYWLQNAMRNELNQLRLDKVVSTLVTQVLVDRDDPAFQDPSKPIGPYYTEDQAQAKMAQSSAIFKEDAGRGWRKVVASPTPLAINEIETIRKLVDDQHIVIASGGGGIPVVQGHDRTFHGVEAVVDKDEASQSLASALEADLFLVLTGVDHVYINFNKEDQERLDQVSYAELEKHMADGQFAAGSMQPKVQACMDFVKANPNSQAVITSLDNLENFLNGGSGTLIQYEAKEFLEA

SEQ ID NO: 2261 - DNA, 1467 bp, Alloiococcus otitidis
  CDS (58)..(1464)
ggtcatgtcatcatagtaaagagtgataggaataagatttatttggaaagtggtggcatgttgaagcattcaaaggataatactcaaggtaaccggtcaagactgtatatccttggagggttcttcgtccttgtcattttggccattgtctttcactacatttggaatgctaaccaggatgaccaaagtcaagaccagctggccgagacagaagtaagccaagcagaccaggaagttagggaccaagaagctagtgacaaaggaaccacccctgaagctagcaaccaagagagagaccaggtaagggatgaaaaaacagagcttcgaatatccctggtaggggatgtcatggtccatggaccgcagttagaggcggcctatgatgaagtaagtggccaatacgattttgacccgacctttgcccccgttgcccccctgattgaagagtctgacctagccctggccaacttggaaacgaccttgccgggagaagaatttggttacacaggctaccccctcttcgcaagtccagattccctggtagatgccttgcaagagtccggttttgatggtttgttcaccgtcaataaccactgcctagatacaggtgtccaaggcctagagcggacagcccaagtcgttgaagacaaggggatggatgccattgggaccttccaggatccggaccaagcccgggtcctccacaaggatattgaaggcattaaagtggccatcctagcctataccgaaatggtcaacccttcccaatttacgacggaatcgcctgaagacatgactccttacctgaatttgctaagtgaagaccaaattttagctgacctagacgaagtagaagaggatacggactttaccttggcctatgtccactggggcgaggagtacactgatcaaccgactgctaaccaagttcattatgcccagtttttagcccaagctggagttgatgcggtcatcggcagtcacccccatgtcatccaagaaacagaggtcattgaaggagaccaagaggagacctttgtcctctattccatgggcaactttgcttccaaccagagagtggaagccctgggtcaggattatgcagctaccgaggatggggttattgttagcttaaacttggtcaaagaccccgagacagggaaagtagacttggctagtgtagactacgatccgacttgggtctggcgctatgaggagggtgaccagtatgcctaccgggtcttgccgattgagtcaaccttagaagaagacttaccgcaggatgtggtcagccggatggaagcttcctaccgaagaagcttggaaaggttggagcccaaagccgaccaaaacaaggaatctgaaagccaggttaacccagatgacccagaagccggtcaagatacagaagaccagtctagcccagacgatcaagaaagtgaccaagaaatggaccaagttgcctaa

SEQ ID NO: 2262 - protein, 469 aa, Alloiococcus otitidis
MLKHSKDNTQGNRSRLYILGGFFVLVILAIVFHYIWNANQDDQSQDQLAETEVSQADQEVRDQEASDKGTTPEASNQERDQVRDEKTELRISLVGDVMVHGPQLEAAYDEVSGQYDFDPTFAPVAPLIEESDLALANLETTLPGEEFGYTGYPLFASPDSLVDALQESGFDGLFTVNNHCLDTGVQGLERTAQVVEDKGMDAIGTFQDPDQARVLHKDIEGIKVAILAYTEMVNPSQFTTESPEDMTPYLNLLSEDQILADLDEVEEDTDFTLAYVHWGEEYTDQPTANQVHYAQFLAQAGVDAVIGSHPHVIQETEVIEGDQEETFVLYSMGNFASNQRVEALGQDYAATEDGVIVSLNLVKDPETGKVDLASVDYDPTWVWRYEEGDQYAYRVLPIESTLEEDLPQDVVSRMEASYRRSLERLEPKADQNKESESQVNPDDPEAGQDTEDQSSPDDQESDQEMDQVA

SEQ ID NO: 2263 - DNA, 1467 bp, Alloiococcus otitidis; identical to SEQ ID NO: 2261
  CDS (43)..(1464)

SEQ ID NO: 2264 - protein, 474 aa, Alloiococcus otitidis
MESGGMLKHSKDNTQGNRSRLYILGGFFVLVILAIVFHYIWNANQDDQSQDQLAETEVSQADQEVRDQEASDKGTTPEASNQERDQVRDEKTELRISLVGDVMVHGPQLEAAYDEVSGQYDFDPTFAPVAPLIEESDLALANLETTLPGEEFGYTGYPLFASPDSLVDALQESGFDGLFTVNNHCLDTGVQGLERTAQVVEDKGMDAIGTFQDPDQARVLHKDIEGIKVAILAYTEMVNPSQFTTESPEDMTPYLNLLSEDQILADLDEVEEDTDFTLAYVHWGEEYTDQPTANQVHYAQFLAQAGVDAVIGSHPHVIQETEVIEGDQEETFVLYSMGNFASNQRVEALGQDYAATEDGVIVSLNLVKDPETGKVDLASVDYDPTWVWRYEEGDQYAYRVLPIESTLEEDLPQDVVSRMEASYRRSLERLEPKADQNKESESQVNPDDPEAGQDTEDQSSPDDQESDQEMDQVA

SEQ ID NO: 2265 - DNA, 1386 bp, Alloiococcus otitidis
  CDS (46)..(1383)
ggccttgtaaaaagcattattttgactagaaaaggttgtgtaaaaatggaaaaacaaaagattatcattattggtgcagctggacgagattttcataatttcaacgttttttaccgcgacaatcccaactaccaggtggtggcttttaccgccagccaaatccccgacattgacgaccgaaaatacccaaaagaactagctggagacctctaccctgacggcattcccatttatacccaggagaaattgcctgacttaatcaaggaattcgatgtagatgaatgtgtctttgcttacagtgacgtcaactaccatgatgtcatggccttgtctgcaaaggttaatagtgcaggagccgattttaagttgatgggacctaagcacaccagccttaaaagtaagaaaccagtgatttctgtctgcgctgtccgaaccgggtctggtaaaagtcaaagctcccgcaaggtcattgagcacttgctagacttaggcttaaaagtggtcgctattcgccaccccatgccttacggtgacctggtggctcaaaaagtccaacgttatgctgacctagctgacttggacaagtatgattgcaccattgaggaaatggaagaatacgaaccccatattgaccgggggaatatcatctactccggtgtagattaccaagctatcctggacgctgccgaaaacgacccagacggctgtgaccttatcttgtgggacggtggtaacaatgacttctcctttattgatgctgacctggccattaccattgctgacccccaccgacctggccatgagattagctactaccctggccaagtgagcttggaaatggctgatctggctgtcattaataaggtggattctgccaagtctgaagatatccaaacggtggaagacaatattaaaacagttaacccccaggcccagattattaaggccgagtccactatcagtgtagatgaccccgacttaatcaaggataaaaaagtcctcatcgttgaagacggtccaaccctaacccacggggaaatgaaatttggggccggtaccgtggcagcccagcgttttgaagcaagccaaattatcgacccccgcccctacctggcagggtcgttaaaagacacctttgaaaaatacccagacattggccagctactccctgccatgggctatggccaccagcaactcaaagacttagaagaaaccattaatcaaacagactgtgataccgtcatcatcgggacccctattgacctcagccgggtcattaacatcaataaaccccacacccgggtccactatgaattaaatgaagtcggtggccaaaccatcaaccaggtcttagaccaatttgtggctcaagaagtcaaacaataa

SEQ ID NO: 2266 - protein, 446 aa, Alloiococcus otitidis
MEKQKIIIIGAAGRDFHNFNVFYRDNPNYQVVAFTASQIPDIDDRKYPKELAGDLYPDGIPIYTQEKLPDLIKEFDVDECVFAYSDVNYHDVMALSAKVNSAGADFKLMGPKHTSLKSKKPVISVCAVRTGSGKSQSSRKVIEHLLDLGLKVVAIRHPMPYGDLVAQKVQRYADLADLDKYDCTIEEMEEYEPHIDRGNIIYSGVDYQAILDAAENDPDGCDLILWDGGNNDFSFIDADLAITIADPHRPGHEISYYPGQVSLEMADLAVINKVDSAKSEDIQTVEDNIKTVNPQAQIIKAESTISVDDPDLIKDKKVLIVEDGPTLTHGEMKFGAGTVAAQRFEASQIIDPRPYLAGSLKDTFEKYPDIGQLLPAMGYGHQQLKDLEETINQTDCDTVIIGTPIDLSRVININKPHTRVHYELNEVGGQTINQVLDQFVAQEVKQ

SEQ ID NO: 2267 - DNA, 1386 bp, Alloiococcus otitidis; identical to SEQ ID NO: 2265
  CDS (22)..(1383)

SEQ ID NO: 2268 - protein, 454 aa, Alloiococcus otitidis
MTRKGCVKMEKQKIIIIGAAGRDFHNFNVFYRDNPNYQVVAFTASQIPDIDDRKYPKELAGDLYPDGIPIYTQEKLPDLIKEFDVDECVFAYSDVNYHDVMALSAKVNSAGADFKLMGPKHTSLKSKKPVISVCAVRTGSGKSQSSRKVIEHLLDLGLKVVAIRHPMPYGDLVAQKVQRYADLADLDKYDCTIEEMEEYEPHIDRGNIIYSGVDYQAILDAAENDPDGCDLILWDGGNNDFSFIDADLAITIADPHRPGHEISYYPGQVSLEMADLAVINKVDSAKSEDIQTVEDNIKTVNPQAQIIKAESTISVDDPDLIKDKKVLIVEDGPTLTHGEMKFGAGTVAAQRFEASQIIDPRPYLAGSLKDTFEKYPDIGQLLPAMGYGHQQLKDLEETINQTDCDTVIIGTPIDLSRVININKPHTRVHYELNEVGGQTINQVLDQFVAQEVKQ

SEQ ID NO: 2269 - DNA, 1254 bp, Alloiococcus otitidis
  CDS (73)..(1251)
agaaggctgaaagtcgtccaagaaattgtaagccctttaaaatgcaaatccaaaaatagaaaggaattagccatgaattacttaaaagaagcccaaagccattttgacgaaatgcttgccaccagacgtcacctccaccagaacccagagaccggttttgaaacccaggagacggctaaatttatcaagaaaaaattaaaagaatatggactggagccagaagatattggagaaaatggggtaaccgccttgattggcccagacaccggtaagaccatcctattgcgggccgatatggatgccctgccgatcaaagaagagtcaggggtagaatttgcctccaaaaatgattacatgcatgcctgtggtcacgacatgcacaccactgtcttgctaactgctgcccgtctcttgaaggaaaacgaagaccagctgaagggacatgtcaagttcatcttccaaccagctgaagaactcttgatcgggggcaaggctatggtagatgccggtatcttagaaaacccaaaagttgatgtggcactaggcctccacgttgccccaaacattgatgagcaagggatcctagttgttgaggaaggtccttggatgacctttgccaacaacttccgcatccggattaaaggggagggagcccacggtgcaaccccttatctaggtgtggacccagtcatgattggggctcaaatcgtcaacggagcccaagaaatattgagccgggagctcccctttgaccgcagtgcaaccttgaccatggggaaattcattgccaagggagctattaatgtgattccgggtgaggctgtcatagaagggactgtccgaggcttttccaacgaaagtaaggactatatcaaaaaacggctacccgaaattgtccaaaaaattgccgaagcttaccggggaagtgctgaatttgaactcctctccgactgcccagtcctagtcaatgatggtgacttctctcgaacagccatctcttacctcaaagaaatttctcaaggggagtttgacatccacaagggtggccaggtccacgcttcagaagactttgcctactatgctgaccaagttccagcctttttcttcaatatcttgacacctaacccggatgccgaagatggcaaactctaccctgtccaccacccaaaagtcgttttcggggaagaaatcctgccaaaagcttccgctatgctgtctcacattgcaacacgttggttggaagaccaggcttaa

SEQ ID NO: 2270 - protein, 393 aa, Alloiococcus otitidis
MNYLKEAQSHFDEMLATRRHLHQNPETGFETQETAKFIKKKLKEYGLEPEDIGENGVTALIGPDTGKTILLRADMDALPIKEESGVEFASKNDYMHACGHDMHTTVLLTAARLLKENEDQLKGHVKFIFQPAEELLIGGKAMVDAGILENPKVDVALGLHVAPNIDEQGILVVEEGPWMTFANNFRIRIKGEGAHGATPYLGVDPVMIGAQIVNGAQEILSRELPFDRSATLTMGKFIAKGAINVIPGEAVIEGTVRGFSNESKDYIKKRLPEIVQKIAEAYRGSAEFELLSDCPVLVNDGDFSRTAISYLKEISQGEFDIHKGGQVHASEDFAYYADQVPAFFFNILTPNPDAEDGKLYPVHHPKVVFGEEILPKASAMLSHIATRWLEDQA

SEQ ID NO: 2271 - DNA, 1941 bp, Alloiococcus otitidis
  CDS (811)..(1938)
atgaggagaatagacatggctacccatactgccagcaagacacactcaacccaccatcaccacccacacagctccctagccgtcattttttattttattggcttaggtctagctattttcggcctattcctgaccaatcaccctagcctgcaagccctcctttatagcttggcttgcctaagtgcaggatttcaggttatcggagaaggcatcagtcaaacctaccatgattcaatccaagcccaaaaatttaaacccaactcccacatcctaatggggttagctggcttgggggccatcctcctgggagaagagctggaggcggccctccttatcttgatctttgcaggagcccattttttagaagactatgctgaaggcaaaagtaaaaaagaaattagcaaattagttgagctgacccccaaattggctagacgtttagatggcctaggtgaaatcgacttggttccagtcgaccaggtccaggtcaaggacttggtccaggtccaaaagggagaccaggttccccttgatggctttgtcgtcaaaggccaaacagctattgatgaatcggccatcaatggtgagagcctagcccaggaaaaaggaccgggtgattcggtttacgcttcaaccatcaacaatcaggccacttttaccatggaagtcagccaggttagtgacgatagcgtcttcgcccaaattctagacctggttagccaaaaccaagaccatatcaccaaacgggcccgaaccatcgactattttgaaccaatctatgtcaactctgtccttgccattaccctcctcttggccctgctaggccccgtcctgtttaacttaacctggcctgagagtctttatcgaggtctcgtcttgttggtagccgcctccccttgtgccttggctgctgccactgtatctgcctccctgtcagcaacttcaaacctagccaagtcaggcctcctatccaaaggaagtcactacctgtcccaacttgctgacatcgatgccatcgctttcgataagaccgggaccttaacccagggagaacttgaattaaccgactactatttgaatcccgacttaaaccaagctaaattgatccaaatttttactgccatggaaaaggaaagcaaccaccccctagcccaggctattgtgaactactttccagaccaagaaagtttaaatatccaggttgaccaggaagtcggtcgcggcctatctgctaactatttgggagacaactaccgaatcggccggcctgactccttcccaatggctgagtccaaaattagccagttaaaggaagtctggtctcaagagggtaaaacggtggtctaccttagtctaaacgacaaggtcattggcttgtttgccctcatggataggatcagaccatccagcaaggaagtgatcgactactttaaacaagctggagtccataccactttaatcagtggtgacagccaggagaccagtcaagccattagccgaagcttggggatagacaattactatgctggggtaatgcctggggacaaggcagctcttatcaaggaacaacaagaaaaatttggccgacttgccatggttggagacgggatcaatgatgccccagccctcaatcaggcagaagtcggaattgcaatgggccaaggaaccgatatagccattgatgtttctgacctggtcctaatgaaccaggacctttccaccctgggactggcccaccaggtcagccaaaaaatggacagggtcatctggcaaaatattgacttggctctagcagtagtcgctatcttgattaccaccagcttactgggtccccttaccatgaccctcagtgttctagtccatgaaggctctaccctcctggtcattctaaacggcctccgcttgctcaaaacccttccaggaaaaaacaagccaggctaa

SEQ ID NO: 2272 - protein, 376 aa, Alloiococcus otitidis
MALLGPVLFNLTWPESLYRGLVLLVAASPCALAAATVSASLSATSNLAKSGLLSKGSHYLSQLADIDAIAFDKTGTLTQGELELTDYYLNPDLNQAKLIQIFTAMEKESNHPLAQAIVNYFPDQESLNIQVDQEVGRGLSANYLGDNYRIGRPDSFPMAESKISQLKEVWSQEGKTVVYLSLNDKVIGLFALMDRIRPSSKEVIDYFKQAGVHTTLISGDSQETSQAISRSLGIDNYYAGVMPGDKAALIKEQQEKFGRLAMVGDGINDAPALNQAEVGIAMGQGTDIAIDVSDLVLMNQDLSTLGLAHQVSQKMDRVIWQNIDLALAVVAILITTSLLGPLTMTLSVLVHEGSTLLVILNGLRLLKTLPGKNKPG

SEQ ID NO: 2273 - DNA, 1941 bp, Alloiococcus otitidis; identical to SEQ ID NO: 2271
  CDS (274)..(1938)

SEQ ID NO: 2274 - protein, 555 aa, Alloiococcus otitidis
MGLAGLGAILLGEELEAALLILIFAGAHFLEDYAEGKSKKEISKLVELTPKLARRLDGLGEIDLVPVDQVQVKDLVQVQKGDQVPLDGFVVKGQTAIDESAINGESLAQEKGPGDSVYASTINNQATFTMEVSQVSDDSVFAQILDLVSQNQDHITKRARTIDYFEPIYVNSVLAITLLLALLGPVLFNLTWPESLYRGLVLLVAASPCALAAATVSASLSATSNLAKSGLLSKGSHYLSQLADIDAIAFDKTGTLTQGELELTDYYLNPDLNQAKLIQIFTAMEKESNHPLAQAIVNYFPDQESLNIQVDQEVGRGLSANYLGDNYRIGRPDSFPMAESKISQLKEVWSQEGKTVVYLSLNDKVIGLFALMDRIRPSSKEVIDYFKQAGVHTTLISGDSQETSQAISRSLGIDNYYAGVMPGDKAALIKEQQEKFGRLAMVGDGINDAPALNQAEVGIAMGQGTDIAIDVSDLVLMNQDLSTLGLAHQVSQKMDRVIWQNIDLALAVVAILITTSLLGPLTMTLSVLVHEGSTLLVILNGLRLLKTLPGKNKPG

SEQ ID NO: 2275 - DNA, 1941 bp, Alloiococcus otitidis; identical to SEQ ID NO: 2271
  CDS (1)..(1938)

SEQ ID NO: 2276 - protein, 646 aa, Alloiococcus otitidis
MRRIDMATHTASKTHSTHHHHPHSSLAVIFYFIGLGLAIFGLFLTNHPSLQALLYSLACLSAGFQVIGEGISQTYHDSIQAQKFKPNSHILMGLAGLGAILLGEELEAALLILIFAGAHFLEDYAEGKSKKEISKLVELTPKLARRLDGLGEIDLVPVDQVQVKDLVQVQKGDQVPLDGFVVKGQTAIDESAINGESLAQEKGPGDSVYASTINNQATFTMEVSQVSDDSVFAQILDLVSQNQDHITKRARTIDYFEPIYVNSVLAITLLLALLGPVLFNLTWPESLYRGLVLLVAASPCALAAATVSASLSATSNLAKSGLLSKGSHYLSQLADIDAIAFDKTGTLTQGELELTDYYLNPDLNQAKLIQIFTAMEKESNHPLAQAIVNYFPDQESLNIQVDQEVGRGLSANYLGDNYRIGRPDSFPMAESKISQLKEVWSQEGKTVVYLSLNDKVIGLFALMDRIRPSSKEVIDYFKQAGVHTTLISGDSQETSQAISRSLGIDNYYAGVMPGDKAALIKEQQEKFGRLAMVGDGINDAPALNQAEVGIAMGQGTDIAIDVSDLVLMNQDLSTLGLAHQVSQKMDRVIWQNIDLALAVVAILITTSLLGPLTMTLSVLVHEGSTLLVILNGLRLLKTLPGKNKPG

SEQ ID NO: 2277 - DNA, 306 bp, Alloiococcus otitidis
  CDS (52)..(303)
cctggcttgttttttcctggaagggttttgagcaagcggaggccgtttagaatgaccaggagggtagagccttcatggactagaacactgagggtcatggtaaggggacccagtaagctggtggtaatcaagatagcgactactgctagagccaagtcaatattttgccagatgaccctgtccattttttggctgacctggtgggccagtcccagggtggaaaggtcctggttcattaggaccaggtcagaaacatcaatggctatatcggttccttggcccattgcaattccgacttctgcctga

SEQ ID NO: 2278 - protein, 84 aa, Alloiococcus otitidis
MTRRVEPSWTRTLRVMVRGPSKLVVIKIATTARAKSIFCQMTLSIFWLTWWASPRVERSWFIRTRSETSMAISVPWPIAIPTSA

SEQ ID NO: 2279 - DNA, 306 bp, Alloiococcus otitidis; identical to SEQ ID NO: 2277
  CDS (7)..(303)

SEQ ID NO: 2280 - protein, 99 aa, Alloiococcus otitidis
MFFPGRVLSKRRPFRMTRRVEPSWTRTLRVMVRGPSKLVVIKIATTARAKSIFCQMTLSIFWLTWWASPRVERSWFIRTRSETSMAISVPWPIAIPTSA

SEQ ID NO: 2281 - DNA, 342 bp, Alloiococcus otitidis
  CDS (19)..(339)
acaggaaaggataaactgatgactgaccatttaagccaagaccaagctttcagtgaattaagctcccaaagtttagagacagtagctcagacttttaaagccttgagcgacccaacccggattcgaatcctctacctcctcgcccaccatgagtgctcggtaaatgaaatagcagacacccttgaccttaagcaatccaccgtctcccaccaactgcggaatttaaagagtctgaacctagtcaagaaaagacgagaggctaccagcctctattattcccccgacgaccaacatgtcttggacctcttgtctaaggctatcgagcatgccttacacgattga

SEQ ID NO: 2282 - protein, 107 aa, Alloiococcus otitidis
MTDHLSQDQAFSELSSQSLETVAQTFKALSDPTRIRILYLLAHHECSVNEIADTLDLKQSTVSHQLRNLKSLNLVKKRREATSLYYSPDDQHVLDLLSKAIEHALHD

SEQ ID NO: 2283 - DNA, 807 bp, Alloiococcus otitidis
  CDS (556)..(804)
agccttttagtcgttattttaaaacaattgttagcctatccttgtcttgttttcctaaataggccaaattataataggggtactggagggattaatatggaattaattagattgatagggatccttattattgtaattggattcgttctaaaattagataccattgctgtagtcctcatagcaggcctggccactgccttggtatctggcatcacctttactgagttcttaaccttattaggagaagcctttgtttccaaccgcctggtgtccatcttcttcttaaccttacccatgattggattggttgaacgctacggcttacgccagcaggcaaccaagcttatatcgggtattaaggggctaacaccgggtcgcttcttgtcgatttatatgtttgctcgggaactagctggattcttttcggtccgggtttatggccaccctcaatttattcggcccttggtagaacccatgtcccagtcttccgtccgggctaagtacggggagccgactccgaatcttaaggagaaaattaaggctcggtcagctgccatggaaaacctggggaacttttttgcccaaaacaccttcgttgccggctccggtgtcctcttgattgcagggactatggagtctttgggctaccaagtctcagccgtcagtgtggcccaagcttcaattccggtagccttgattgctttagtctttgttttgctttctaactatttactggaccgcaaaattgaccgagcttacaaggggaaagagccacaagtgccaaaagaaagtgaaagagaggcttaa

SEQ ID NO: 2284 - protein, 83 aa, Alloiococcus otitidis
MENLGNFFAQNTFVAGSGVLLIAGTMESLGYQVSAVSVAQASIPVALIALVFVLLSNYLLDRKIDRAYKGKEPQVPKESEREA

SEQ ID NO: 2285 - DNA, 807 bp, Alloiococcus otitidis; identical to SEQ ID NO: 2283
  CDS (97)..(804)

SEQ ID NO: 2286 - protein, 236 aa, Alloiococcus otitidis
MELIRLIGILIIVIGFVLKLDTIAVVLIAGLATALVSGITFTEFLTLLGEAFVSNRLVSIFFLTLPMIGLVERYGLRQQATKLISGIKGLTPGRFLSIYMFARELAGFFSVRVYGHPQFIRPLVEPMSQSSVRAKYGEPTPNLKEKIKARSAAMENLGNFFAQNTFVAGSGVLLIAGTMESLGYQVSAVSVAQASIPVALIALVFVLLSNYLLDRKIDRAYKGKEPQVPKESEREA

SEQ ID NO: 2287 - DNA, 807 bp, Alloiococcus otitidis; identical to SEQ ID NO: 2283
  CDS (28)..(804)

SEQ ID NO: 2288 - protein, 259 aa, Alloiococcus otitidis
MLAYPCLVFLNRPNYNRGTGGINMELIRLIGILIIVIGFVLKLDTIAVVLIAGLATALVSGITFTEFLTLLGEAFVSNRLVSIFFLTLPMIGLVERYGLRQQATKLISGIKGLTPGRFLSIYMFARELAGFFSVRVYGHPQFIRPLVEPMSQSSVRAKYGEPTPNLKEKIKARSAAMENLGNFFAQNTFVAGSGVLLIAGTMESLGYQVSAVSVAQASIPVALIALVFVLLSNYLLDRKIDRAYKGKEPQVPKESEREA

SEQ ID NO: 2289 - DNA, 939 bp, Alloiococcus otitidis
  CDS (637)..(936)
aagagaggcttaaccatggaagcagtatctgaatacttaattgaatttttctttgttttaaccggcttgctcatggcctatactggtgtgcgggtggccatggaccaaaaccacccagcccggtttgggactggcctcttttggttaattctggctgccacttttgccttgggccaagtcatcccctatgaagtaacgggggttttaatcttgattatggggggattgaccctcttcaaccaggttaaaattggtccaattaccactgcttccgaggaagagtcaaagggccacagcgaccgtttgggcaaccggatttttatcccagttgtctctttagctcttatagctattttactagcccaatttacccccttggatggccaggctgggattgggattgcttctatactagctattttgattggtgttttggtaacccggtccaagtttaagacaagtctggatgaaggggaccggatgaaccggcaagttggaacagtgggtatcctgccccaactcctggctgccttgggtgtcatttttacgacagctggggtaggggaggttatttcttccctgatttctggaattgtaccagcgggtagccccttgttgggagttaccgcttatgtcttgggtatggtggttttttccatgattatgggcaatacctttgcagcctttaccgttatcacagcaggggttgggatcccctttgtcattgcccagggagcagacccagtcattactggggctttggctatgacagctggctactgtgggaccttaatgactccgatggcagccaatttcaatgccttgcctgtagcccttttggagatggacaatcccaatagtgtcatcaaggagcaagttccttatgccttggttatgattgtggtccatatcctcctcatgtacttctgggctttttag

SEQ ID NO: 2290 - protein, 100 aa, Alloiococcus otitidis
MGMVVFSMIMGNTFAAFTVITAGVGIPFVIAQGADPVITGALAMTAGYCGTLMTPMAANFNALPVALLEMDNPNSVIKEQVPYALVMIVVHILLMYFWAF

SEQ ID NO: 2291 - DNA, 939 bp, Alloiococcus otitidis; identical to SEQ ID NO: 2289
  CDS (481)..(936)

SEQ ID NO: 2292 - protein, 152 aa, Alloiococcus otitidis
MNRQVGTVGILPQLLAALGVIFTTAGVGEVISSLISGIVPAGSPLLGVTAYVLGMVVFSMIMGNTFAAFTVITAGVGIPFVIAQGADPVITGALAMTAGYCGTLMTPMAANFNALPVALLEMDNPNSVIKEQVPYALVMIVVHILLMYFWAF

SEQ ID NO: 2293 - DNA, 939 bp, Alloiococcus otitidis; identical to SEQ ID NO: 2289
  CDS (304)..(936)

SEQ ID NO: 2294 - protein, 211 aa, Alloiococcus otitidis
MGNRIFIPVVSLALIAILLAQFTPLDGQAGIGIASILAILIGVLVTRSKFKTSLDEGDRMNRQVGTVGILPQLLAALGVIFTTAGVGEVISSLISGIVPAGSPLLGVTAYVLGMVVFSMIMGNTFAAFTVITAGVGIPFVIAQGADPVITGALAMTAGYCGTLMTPMAANFNALPVALLEMDNPNSVIKEQVPYALVMIVVHILLMYFWAF

SEQ ID NO: 2295 - DNA, 939 bp, Alloiococcus otitidis; identical to SEQ ID NO: 2289
  CDS (169)..(936)

SEQ ID NO: 2296 - protein, 256 aa, Alloiococcus otitidis
MGQVIPYEVTGVLILIMGGLTLFNQVKIGPITTASEEESKGHSDRLGNRIFIPVVSLALIAILLAQFTPLDGQAGIGIASILAILIGVLVTRSKFKTSLDEGDRMNRQVGTVGILPQLLAALGVIFTTAGVGEVISSLISGIVPAGSPLLGVTAYVLGMVVFSMIMGNTFAAFTVITAGVGIPFVIAQGADPVITGALAMTAGYCGTLMTPMAANFNALPVALLEMDNPNSVIKEQVPYALVMIVVHILLMYFWAF

SEQ ID NO: 2297 - DNA, 939 bp, Alloiococcus otitidis; identical to SEQ ID NO: 2289
  CDS (16)..(936)

SEQ ID NO: 2298 - protein, 307 aa, Alloiococcus otitidis
MEAVSEYLIEFFFVLTGLLMAYTGVRVAMDQNHPARFGTGLFWLILAATFALGQVIPYEVTGVLILIMGGLTLFNQVKIGPITTASEEESKGHSDRLGNRIFIPVVSLALIAILLAQFTPLDGQAGIGIASILAILIGVLVTRSKFKTSLDEGDRMNRQVGTVGILPQLLAALGVIFTTAGVGEVISSLISGIVPAGSPLLGVTAYVLGMVVFSMIMGNTFAAFTVITAGVGIPFVIAQGADPVITGALAMTAGYCGTLMTPMAANFNALPVALLEMDNPNSVIKEQVPYALVMIVVHILLMYFWAF

SEQ ID NO: 2299 - DNA, 669 bp, Alloiococcus otitidis
  CDS (22)..(666)
ataggaaaggaaggtcttaccatgaaaattttagtcacagcctttgacccctttggtggtgaagagattaacccagccttggaagccgtcaaagacttaccagatgagatttcagaagctcaagttattaaattagaaataccgacagttttccacaagtcagccgacaaggtcaagcaagccatcatagaccacgaccctgatgtgattttagccattggtcaagcagggggccggtatggggtaaccccagagcgggtagctatcaatgttgatgatggacggattgaagacaatgaaggcaaccagcccattgacagccccatccaagctgatggccagcccgcttacttctccagcctgccaatcaaggcgatggtggaagccattaaggcggaaggtctgccgtcatctgtttccaattcagccggaacctttgtctgcaaccatattatgtaccagatcctctacatgattgacaaggattttccgggtaaaatcggtggctttgtccatgttccttttaccagccaacaagttgtcgacaaggccaaccagcctgctatgagtttggctgatatcagccgggccttgcaagcagctatccgggctattgtagaccaggatggcaaaggcgatatcaaaaaagttggcggggctatccactga

SEQ ID NO: 2300 - protein, 215 aa, Alloiococcus otitidis
MKILVTAFDPFGGEEINPALEAVKDLPDEISEAQVIKLEIPTVFHKSADKVKQAIIDHDPDVILAIGQAGGRYGVTPERVAINVDDGRIEDNEGNQPIDSPIQADGQPAYFSSLPIKAMVEAIKAEGLPSSVSNSAGTFVCNHIMYQILYMIDKDFPGKIGGFVHVPFTSQQVVDKANQPAMSLADISRALQAAIRAIVDQDGKGDIKKVGGAIH

SEQ ID NO: 2301 - DNA, 1854 bp, Alloiococcus otitidis
  CDS (31)..(1851)
aaatgtaacacaaaaatctggccatgcaaaatgagttatgtgtcagagcagttttatttctttaaaattatttttagtatcattttagtccagtattatgaccccaatagaaaggagtattggatgtcagctttactagatgtcaaagacctgtccgtttccttcactacaggaacccagacccaagaagtggtccaccaggtctccttcgcccttgaagaaggccaaaccctaggcctggtcggcgaatctggaagcgggaaaagcgttacatcaaaggctatattgcaactattagcccccaatgcggaagtaaatgatgggtctattgtttacttcaatggccaaaacttgctctccaagaatgaaaaggacatgcaaaagatacggggcaaggaaatttccatgatcttccaagaccccatgacctccctcaaccctaccatgaccgtgggcaagcaaatcacggaaaccttgaaataccatgaaaaattatccactaaagaagccaaccaacggggtaagagtattatggaagaggtgggaattgaccgggtagactaccgttttaaccaataccccaatgaattctcgggaggtatgcggcaacgggtcatgatcgccattgccctagcctgcaaccctaaattaattattgccgatgaacccacaactgccttggacgtgactatccaggcccaggtgctcaacttacttaaaagactgcaaaagaaccggaacatggccatcctcctgattactcacgactttggtgtcgttgcggatatatgtgaccgggtagtggttttaaaagatggccatatcgttgaacgaggccaaaccctagacgtctttaaaaatccgaaagatagctataccaaacgtcttttagaagctgtccccaacctcaaaactgaaaagactcctaaagacctggcccggatccaaaaaatcctcaatggggacaaggaaaaattaatcgaagttaaaaaactttacaaggaatttcccgtcaaccgctatgagaaagtcaagcccgttaaccaattgacctttgatatttacaagggagagaccttaggtttggtgggcgagtcggggtcaggtaagtcgacaacgggtcggtccatcttgcgcttgcaccaaccagaagctggccaggttaaatttgctggcttttccatgaacaacttgtccaaaaaggaactcaaggcagtccgcaaaaacatgcaaatggtcttccaagacccctatgcctccctcaacccaaggatgaagattgtcgatattatcggtgaagccttagatatccacggactggctcaaaataagaaagaccggtatgaccgggttgttgacctcctatccatggttaacctgccagctgattatgccgaacgctacccccatgaattctctggtggtcaaagacagcggatcggtatcgcccgggccttggcggtagaccctgaattcatccttcttgatgaacccctatcagcccttgatgcctccattcaaatggatgttatgaacctcttgaatgacctaaaagagcaattggacttgacctacctctttatcgcccacgacctggcgacagttaagtacctgtcagaccggattgctgtcatgcacaagggccggattgtagaactcgctcccaccaccaccctttttgacaatcccatcctgccttacaccaagcgactcttggcctccattcccatccctgacccagaagatcagagccaagaccaacaaagagtggccatggacttgcaagaatcggaggactatccagaagatggtcacttggtggaaatcgaacccaaccactatgtttaccaataa

SEQ ID NO: 2302 - protein, 607 aa, Alloiococcus otitidis
MSYVSEQFYFFKIIFSIILVQYYDPNRKEYWMSALLDVKDLSVSFTTGTQTQEVVHQVSFALEEGQTLGLVGESGSGKSVTSKAILQLLAPNAEVNDGSIVYFNGQNLLSKNEKDMQKIRGKEISMIFQDPMTSLNPTMTVGKQITETLKYHEKLSTKEANQRGKSIMEEVGIDRVDYRFNQYPNEFSGGMRQRVMIAIALACNPKLIIADEPTTALDVTIQAQVLNLLKRLQKNRNMAILLITHDFGVVADICDRVVVLKDGHIVERGQTLDVFKNPKDSYTKRLLEAVPNLKTEKTPKDLARIQKILNGDKEKLIEVKKLYKEFPVNRYEKVKPVNQLTFDIYKGETLGLVGESGSGKSTTGRSILRLHQPEAGQVKFAGFSMNNLSKKELKAVRKNMQMVFQDPYASLNPRMKIVDIIGEALDIHGLAQNKKDRYDRVVDLLSMVNLPADYAERYPHEFSGGQRQRIGIARALAVDPEFILLDEPLSALDASIQMDVMNLLNDLKEQLDLTYLFIAHDLATVKYLSDRIAVMHKGRIVELAPTTTLFDNPILPYTKRLLASIPIPDPEDQSQDQQRVAMDLQESEDYPEDGHLVEIEPNHYVYQ

SEQ ID NO: 2303 - DNA, 1434 bp, Alloiococcus otitidis
  CDS (1150)..(1431)
ttatacattaaacgagaggtgatacaagtgcaaggaagtgcaaagtcgacctggctagctgacttggcttatgatttcaagttgatcttgcaggagagaacttggctggtaatccttatcatccttggccccatttttcacttgtttgcttttatcaagtacttaggagtcaaaaaagatgtcaagcgtcaagagatgaccgaagattacagccaggaagaactaaataaattgagagcggaaatagaagaagaggagcaagcaaaggaagactatcttgcctttactcgaagccaagaggatcggcaaaagcgggtggaccagattattcaaaatatggtcaaaagacggtccagccaacaaagccggcagagcctaaccctctacgccgaagtttgccaagatattttatctagcccttggggatttatctttgccctggtcttggccttgcctatgaccttggtcctcttagtcttgtctagcccaaccctaagctttattgtgcgacggattctcttgatgcttttggttatagtaggtgttgttttcatcgtcttcaccctcttatacctgtcaccatctgacccggccgtcaatatcttgggcgagcaggcgacagatgctgagattgccaattttagacaggtttacggtttagaagatccttacttagttcagttgttccgggccattgctggggtctttacatttgacttcgggaataccctgcaagggaatatcagcgtcatggctgatattgtgtcgcgctttccagtgaccttgaccatgaccttttttgccctcctattagccattattatcgccctaccagctggaatttatgctggcgttaaccccaacaccaaattcgactacatttttatgtttttcgccttgatagggatttccatgcccaccttctggctaggccttctctttattttggccttttcagttgagttgggctggctgccggcgacttacaaccccattgacaatctctcattgattatgcccattatcgtcttgagtgtgactttgatggcggaggtctcccggatggcccggtcctctaccttagaatcgatcaatgaggactatatcatgacggctcaatccaagggtctgccgagactgcgggtaatcttgcgccacgtggtgcccaacgccctgatccctgtaatcaccattgttggcctccaattctccgccatgttgggtgggtcagcggtcaccgagcaggtcttctctgtaccaggtattggctcttacatcgtagacaagcagttcctaccagatgtgccagctgtcttgggtggtgtagtctatattgcagtcgccttgtcgattgtgaaccttctggtagacctcttgtatagttttattgacccacgtatccggactaaaattcaaaacggacaaatcaaatag

SEQ ID NO: 2304 - protein, 94 aa, Alloiococcus otitidis
MRHVVPNALIPVITIVGLQFSAMLGGSAVTEQVFSVPGIGSYIVDKQFLPDVPAVLGGVVYIAVALSIVNLLVDLLYSFIDPRIRTKIQNGQIK

SEQ ID NO: 2305 - DNA, 1434 bp, Alloiococcus otitidis; identical to SEQ ID NO: 2303
  CDS (751)..(1431)

SEQ ID NO: 2306 - protein, 227 aa, Alloiococcus otitidis
MADIVSRFPVTLTMTFFALLLAIIIALPAGIYAGVNPNTKFDYIFMFFALIGISMPTFWLGLLFILAFSVELGWLPATYNPIDNLSLIMPIIVLSVTLMAEVSRMARSSTLESINEDYIMTAQSKGLPRLRVILRHVVPNALIPVITIVGLQFSAMLGGSAVTEQVFSVPGIGSYIVDKQFLPDVPAVLGGVVYIAVALSIVNLLVDLLYSFIDPRIRTKIQNGQIK

SEQ ID NO: 2307 - DNA, 1434 bp, Alloiococcus otitidis; identical to SEQ ID NO: 2303
  CDS (457)..(1431)

SEQ ID NO: 2308 - protein, 325 aa, Alloiococcus otitidis
MTLVLLVLSSPTLSFIVRRILLMLLVIVGVVFIVFTLLYLSPSDPAVNILGEQATDAEIANFRQVYGLEDPYLVQLFRAIAGVFTFDFGNTLQGNISVMADIVSRFPVTLTMTFFALLLAIIIALPAGIYAGVNPNTKFDYIFMFFALIGISMPTFWLGLLFILAFSVELGWLPATYNPIDNLSLIMPIIVLSVTLMAEVSRMARSSTLESINEDYIMTAQSKGLPRLRVILRHVVPNALIPVITIVGLQFSAMLGGSAVTEQVFSVPGIGSYIVDKQFLPDVPAVLGGVVYIAVALSIVNLLVDLLYSFIDPRIRTKIQNGQIK

SEQ ID NO: 2309 - DNA, 1434 bp, Alloiococcus otitidis; identical to SEQ ID NO: 2303
  CDS (196)..(1431)

SEQ ID NO: 2310 - protein, 412 aa, Alloiococcus otitidis
MTEDYSQEELNKLRAEIEEEEQAKEDYLAFTRSQEDRQKRVDQIIQNMVKRRSSQQSRQSLTLYAEVCQDILSSPWGFIFALVLALPMTLVLLVLSSPTLSFIVRRILLMLLVIVGVVFIVFTLLYLSPSDPAVNILGEQATDAEIANFRQVYGLEDPYLVQLFRAIAGVFTFDFGNTLQGNISVMADIVSRFPVTLTMTFFALLLAIIIALPAGIYAGVNPNTKFDYIFMFFALIGISMPTFWLGLLFILAFSVELGWLPATYNPIDNLSLIMPIIVLSVTLMAEVSRMARSSTLESINEDYIMTAQSKGLPRLRVILRHVVPNALIPVITIVGLQFSAMLGGSAVTEQVFSVPGIGSYIVDKQFLPDVPAVLGGVVYIAVALSIVNLLVDLLYSFIDPRIRTKIQNGQIK

SEQ ID NO: 2311 - DNA, 1434 bp, Alloiococcus otitidis; identical to SEQ ID NO: 2303
  CDS (64)..(1431)

SEQ ID NO: 2312 - protein, 456 aa, Alloiococcus otitidis
MAYDFKLILQERTWLVILIILGPIFHLFAFIKYLGVKKDVKRQEMTEDYSQEELNKLRAEIEEEEQAKEDYLAFTRSQEDRQKRVDQIIQNMVKRRSSQQSRQSLTLYAEVCQDILSSPWGFIFALVLALPMTLVLLVLSSPTLSFIVRRILLMLLVIVGVVFIVFTLLYLSPSDPAVNILGEQATDAEIANFRQVYGLEDPYLVQLFRAIAGVFTFDFGNTLQGNISVMADIVSRFPVTLTMTFFALLLAIIIALPAGIYAGVNPNTKFDYIFMFFALIGISMPTFWLGLLFILAFSVELGWLPATYNPIDNLSLIMPIIVLSVTLMAEVSRMARSSTLESINEDYIMTAQSKGLPRLRVILRHVVPNALIPVITIVGLQFSAMLGGSAVTEQVFSVPGIGSYIVDKQFLPDVPAVLGGVVYIAVALSIVNLLVDLLYSFIDPRIRTKIQNGQIK

SEQ ID NO: 2313 - DNA, 1434 bp, Alloiococcus otitidis; identical to SEQ ID NO: 2303
  CDS (28)..(1431)

SEQ ID NO: 2314 - protein, 468 aa, Alloiococcus otitidis
MQGSAKSTWLADLAYDFKLILQERTWLVILIILGPIFHLFAFIKYLGVKKDVKRQEMTEDYSQEELNKLRAEIEEEEQAKEDYLAFTRSQEDRQKRVDQIIQNMVKRRSSQQSRQSLTLYAEVCQDILSSPWGFIFALVLALPMTLVLLVLSSPTLSFIVRRILLMLLVIVGVVFIVFTLLYLSPSDPAVNILGEQATDAEIANFRQVYGLEDPYLVQLFRAIAGVFTFDFGNTLQGNISVMADIVSRFPVTLTMTFFALLLAIIIALPAGIYAGVNPNTKFDYIFMFFALIGISMPTFWLGLLFILAFSVELGWLPATYNPIDNLSLIMPIIVLSVTLMAEVSRMARSSTLESINEDYIMTAQSKGLPRLRVILRHVVPNALIPVITIVGLQFSAMLGGSAVTEQVFSVPGIGSYIVDKQFLPDVPAVLGGVVYIAVALSIVNLLVDLLYSFIDPRIRTKIQNGQIK

SEQ ID NO: 2315 - DNA, 1434 bp, Alloiococcus otitidis; identical to SEQ ID NO: 2303
  CDS (19)..(1431)

SEQ ID NO: 2316 - protein, 471 aa, Alloiococcus otitidis
MIQVQGSAKSTWLADLAYDFKLILQERTWLVILIILGPIFHLFAFIKYLGVKKDVKRQEMTEDYSQEELNKLRAEIEEEEQAKEDYLAFTRSQEDRQKRVDQIIQNMVKRRSSQQSRQSLTLYAEVCQDILSSPWGFIFALVLALPMTLVLLVLSSPTLSFIVRRILLMLLVIVGVVFIVFTLLYLSPSDPAVNILGEQATDAEIANFRQVYGLEDPYLVQLFRAIAGVFTFDFGNTLQGNISVMADIVSRFPVTLTMTFFALLLAIIIALPAGIYAGVNPNTKFDYIFMFFALIGISMPTFWLGLLFILAFSVELGWLPATYNPIDNLSLIMPIIVLSVTLMAEVSRMARSSTLESINEDYIMTAQSKGLPRLRVILRHVVPNALIPVITIVGLQFSAMLGGSAVTEQVFSVPGIGSYIVDKQFLPDVPAVLGGVVYIAVALSIVNLLVDLLYSFIDPRIRTKIQNGQIK

SEQ ID NO: 2317 - DNA, 1461 bp, Alloiococcus otitidis
  CDS (964)..(1458)
gaggtggcaaagaagatgtctcattaccgacagaagaaaattatcaatcaaatgacctttaacaaccccatcttgattgtcatgaccctgatcttagccctcatgagtatttttggctcattcggcttgggtttatggctttacaccggcttaaccctggtcttaactggggttcatatcatccttttaagaaggtttgaaagggaaaaaggagacagtcccaaaagcatgaaaggattggcctgggtcttaatagcagggcttttaatagggaatttgttcacctttacctctggggccacagtggttaaagaaaagatcaccacttcctaccaatacagcatctatatggtggtggcagatgttttcgttatcttagtaaccttaagtaacctctttaagccttttgtagcagaccactttgtgaccatggtcatcctcttaagtctagttttagccttccacctctttgtccttgtttggggacagggctacaaggactttagtcagcctggtcaaatcaccttgcaagttcttttaattgccagcctcctattggggaacttgtttgccctcttggtggcaattggcctccacagggagagtcaagaatttgaatacgccagacgtccgagttccgttttagataaattgaccaataatgctgcagccttgttgggacttgcctttatcatctttttagtgatgatttccataacttcttactggtcctttagcagcgagtttgccattgttaacgactatgacaatatcttacgcaatccttccttgacctatccattcgggaccgacaactttggtcgggacgttttctcaagagtggttcttggggctcggatttccttctttgtgggctttttgtctaccatccttcccttctttgtggggggacttttaggagcagtgtcaggtttttatgggaacaaggtagacaatgtcattatgcgacttttggacgttctctatgccatccctggtctagtcttagccattaccattgtggcagcttttgggacctccattcccaacctgatcttggccttaagtatcggggggattccagcttacgccagaaccatgcggggggatgtcctccaggtggtcaactatgaatatgtagaatcctcctatgcccttggtcaatcggattggaatatcatccgtaaacatatcattcccaatgccatgtcatccatgattgtcattgcctcagtggaaattgggaccgccgttatcgcagtctccagcttgagtttcttgggcttgggcgttgaaccccaagttccggagtgggggaatattttacagacaggcagtgaattcctagaaaccgacccccacctggccatattccccggcattgcaatcattctgttagtcttgtcatttaactttttaggagatggtttacgtgatgcgacagatccaaaaacaagataa

SEQ ID NO: 2318 - protein, 165 aa, Alloiococcus otitidis
MRLLDVLYAIPGLVLAITIVAAFGTSIPNLILALSIGGIPAYARTMRGDVLQVVNYEYVESSYALGQSDWNIIRKHIIPNAMSSMIVIASVEIGTAVIAVSSLSFLGLGVEPQVPEWGNILQTGSEFLETDPHLAIFPGIAIILLVLSFNFLGDGLRDATDPKTR

SEQ ID NO: 2319 - DNA, 1461 bp, Alloiococcus otitidis; identical to SEQ ID NO: 2317
  CDS (841)..(1458)

SEQ ID NO: 2320 - protein, 206 aa, Alloiococcus otitidis
MVLGARISFFVGFLSTILPFFVGGLLGAVSGFYGNKVDNVIMRLLDVLYAIPGLVLAITIVAAFGTSIPNLILALSIGGIPAYARTMRGDVLQVVNYEYVESSYALGQSDWNIIRKHIIPNAMSSMIVIASVEIGTAVIAVSSLSFLGLGVEPQVPEWGNILQTGSEFLETDPHLAIFPGIAIILLVLSFNFLGDGLRDATDPKTR

SEQ ID NO: 2321 - DNA, 1461 bp, Alloiococcus otitidis; identical to SEQ ID NO: 2317
  CDS (652)..(1458)

SEQ ID NO: 2322 - protein, 269 aa, Alloiococcus otitidis
MTNNAAALLGLAFIIFLVMISITSYWSFSSEFAIVNDYDNILRNPSLTYPFGTDNFGRDVFSRVVLGARISFFVGFLSTILPFFVGGLLGAVSGFYGNKVDNVIMRLLDVLYAIPGLVLAITIVAAFGTSIPNLILALSIGGIPAYARTMRGDVLQVVNYEYVESSYALGQSDWNIIRKHIIPNAMSSMIVIASVEIGTAVIAVSSLSFLGLGVEPQVPEWGNILQTGSEFLETDPHLAIFPGIAIILLVLSFNFLGDGLRDATDPKTR

SEQ ID NO: 2323 - DNA, 1461 bp, Alloiococcus otitidis; identical to SEQ ID NO: 2317
  CDS (526)..(1458)

SEQ ID NO: 2324 - protein, 311 aa, Alloiococcus otitidis
MQVLLIASLLLGNLFALLVAIGLHRESQEFEYARRPSSVLDKLTNNAAALLGLAFIIFLVMISITSYWSFSSEFAIVNDYDNILRNPSLTYPFGTDNFGRDVFSRVVLGARISFFVGFLSTILPFFVGGLLGAVSGFYGNKVDNVIMRLLDVLYAIPGLVLAITIVAAFGTSIPNLILALSIGGIPAYARTMRGDVLQVVNYEYVESSYALGQSDWNIIRKHIIPNAMSSMIVIASVEIGTAVIAVSSLSFLGLGVEPQVPEWGNILQTGSEFLETDPHLAIFPGIAIILLVLSFNFLGDGLRDATDPKTR

SEQ ID NO: 2325 - DNA, 1461 bp, Alloiococcus otitidis; identical to SEQ ID NO: 2317
  CDS (229)..(1458)

SEQ ID NO: 2326 - protein, 410 aa, Alloiococcus otitidis
MKGLAWVLIAGLLIGNLFTFTSGATVVKEKITTSYQYSIYMVVADVFVILVTLSNLFKPFVADHFVTMVILLSLVLAFHLFVLVWGQGYKDFSQPGQITLQVLLIASLLLGNLFALLVAIGLHRESQEFEYARRPSSVLDKLTNNAAALLGLAFIIFLVMISITSYWSFSSEFAIVNDYDNILRNPSLTYPFGTDNFGRDVFSRVVLGARISFFVGFLSTILPFFVGGLLGAVSGFYGNKVDNVIMRLLDVLYAIPGLVLAITIVAAFGTSIPNLILALSIGGIPAYARTMRGDVLQVVNYEYVESSYALGQSDWNIIRKHIIPNAMSSMIVIASVEIGTAVIAVSSLSFLGLGVEPQVPEWGNILQTGSEFLETDPHLAIFPGIAIILLVLSFNFLGDGLRDATDPKTR

SEQ ID NO: 2327 - DNA, 1461 bp, Alloiococcus otitidis; identical to SEQ ID NO: 2317
  CDS (16)..(1458)

SEQ ID NO: 2328 - protein, 481 aa, Alloiococcus otitidis
MSHYRQKKIINQMTFNNPILIVMTLILALMSIFGSFGLGLWLYTGLTLVLTGVHIILLRRFEREKGDSPKSMKGLAWVLIAGLLIGNLFTFTSGATVVKEKITTSYQYSIYMVVADVFVILVTLSNLFKPFVADHFVTMVILLSLVLAFHLFVLVWGQGYKDFSQPGQITLQVLLIASLLLGNLFALLVAIGLHRESQEFEYARRPSSVLDKLTNNAAALLGLAFIIFLVMISITSYWSFSSEFAIVNDYDNILRNPSLTYPFGTDNFGRDVFSRVVLGARISFFVGFLSTILPFFVGGLLGAVSGFYGNKVDNVIMRLLDVLYAIPGLVLAITIVAAFGTSIPNLILALSIGGIPAYARTMRGDVLQVVNYEYVESSYALGQSDWNIIRKHIIPNAMSSMIVIASVEIGTAVIAVSSLSFLGLGVEPQVPEWGNILQTGSEFLETDPHLAIFPGIAIILLVLSFNFLGDGLRDATDPKTR

SEQ ID NO: 2329 - DNA, 1461 bp, Alloiococcus otitidis; identical to SEQ ID NO: 2317
  CDS (4)..(1458)

SEQ ID NO: 2330 - protein, 485 aa, Alloiococcus otitidis
MAKKMSHYRQKKIINQMTFNNPILIVMTLILALMSIFGSFGLGLWLYTGLTLVLTGVHIILLRRFEREKGDSPKSMKGLAWVLIAGLLIGNLFTFTSGATVVKEKITTSYQYSIYMVVADVFVILVTLSNLFKPFVADHFVTMVILLSLVLAFHLFVLVWGQGYKDFSQPGQITLQVLLIASLLLGNLFALLVAIGLHRESQEFEYARRPSSVLDKLTNNAAALLGLAFIIFLVMISITSYWSFSSEFAIVNDYDNILRNPSLTYPFGTDNFGRDVFSRVVLGARISFFVGFLSTILPFFVGGLLGAVSGFYGNKVDNVIMRLLDVLYAIPGLVLAITIVAAFGTSIPNLILALSIGGIPAYARTMRGDVLQVVNYEYVESSYALGQSDWNIIRKHIIPNAMSSMIVIASVEIGTAVIAVSSLSFLGLGVEPQVPEWGNILQTGSEFLETDPHLAIFPGIAIILLVLSFNFLGDGLRDATDPKTR

SEQ ID NO: 2331 - DNA, 1878 bp, Alloiococcus otitidis
  CDS (145)..(1875)
gagatggtttacgtgatgcgacagatccaaaaacaagataagtccctaatccagcgcttaaaacaattcagtctttgcctaacccccttactcttaactggctgtgccagtttacagactgaatctgacctagcctccaaccaggtggaagggcaggaaattagccaaaaagatgaaaccattgaaattttaaccaccaatgactccatgaccagtgccaatgtcttgcgggaccagctggtacgaaatggttttgacgtggaatttaatatccaaccagatttttccagtttattggcccagcacgatgtggggaactttgatattaccatgatgggttggtcaacggtgacaggcagtcccgattatgctgtccggtccatctaccactcccagggggattcttccttgattgaagacccctatgtggatgaattgattgaccaagcggcaactgaattgccagaggactaccaagccacctacaccgaattggaagattatgttgtggaagaccaggcctatgcggtagggaccgatacccggtatgaacccttggcctttaaccacgaggtcttagacccagacagcattgtcaactacagtgcccgagagattccttggaatgaactgtcctatttggatgaaggtcaaaatgaaacaaggcccttggtaacttcccagcagtatgtggaaatgacctcccttgaccctatccgggcaaatgatgcctctgttgctgcggtcaactccaatatgtatagccgtttggtgaacttagacgaaaacgatgaagtgacaaccgatgattctctctcctataactatgtcattggagaaggcaaccaggactattactttatcttaagagacaatgtcaactttgctaaagtagaagacggccaggtagaagacaccggtgacttggttggcggggaagatgtcgtctactccctcaaccgggctgcaaatcctgactccgtgccggaccacctgtcttattccttatttaccatggtggagggggcagaattggtgacagacttggatgagctggctagtaaccagtctagccaaagcgacgccagcctcttagaagaattagaatcaggtttagaccagccgatccaagccttggtcgaaagtgacgatgaggtggacaaccaatcaggctactaccaggtagtgaagttgaccactgaatttcctttccctcaagtcctcaaccatttggcccacgtggcatcgggcattgtctccaaagaccaggtcgaatcagtcaatgacttcgaagttgaagattacaaccctgctgaagaccgggcctacggggaccaagctgccttgatgcgggggggcagttacgacaaccacctctatgctagtggtccttatattatgatctaccgggacaatacccaagccatcttccagaaaaacccagcctataagccggatagtgacgaggaggctcagattgaccaggtcaccctccgattgatttcggatgccactagctccctatcagccttacggtcaggagagctggacctcttgcaggggagtgaggaaatcttgccagtcaagtatgaagtgatcgaggaagaaaaccacctcagcctggatacagttgtgggaacaggggtcagctatatccagtttaacctccttagtgatgaccggcccatcagccagtctgccaacctgcgtcgggccgtcctttacaccatcaaccaagatgagatgatagcgattgagcaaggcaacagcctgccagcccggtcgaccttgacccctataatcgatacaggcaagcagggcatagaggcagactcagaaaaagtagagttctactataatgaatacctcaatgaataa

SEQ ID NO: 2332 - protein, 577 aa, Alloiococcus otitidis
MEGQEISQKDETIEILTTNDSMTSANVLRDQLVRNGFDVEFNIQPDFSSLLAQHDVGNFDITMMGWSTVTGSPDYAVRSIYHSQGDSSLIEDPYVDELIDQAATELPEDYQATYTELEDYVVEDQAYAVGTDTRYEPLAFNHEVLDPDSIVNYSAREIPWNELSYLDEGQNETRPLVTSQQYVEMTSLDPIRANDASVAAVNSNMYSRLVNLDENDEVTTDDSLSYNYVIGEGNQDYYFILRDNVNFAKVEDGQVEDTGDLVGGEDVVYSLNRAANPDSVPDHLSYSLFTMVEGAELVTDLDELASNQSSQSDASLLEELESGLDQPIQALVESDDEVDNQSGYYQVVKLTTEFPFPQVLNHLAHVASGIVSKDQVESVNDFEVEDYNPAEDRAYGDQAALMRGGSYDNHLYASGPYIMIYRDNTQAIFQKNPAYKPDSDEEAQIDQVTLRLISDATSSLSALRSGELDLLQGSEEILPVKYEVIEEENHLSLDTVVGTGVSYIQFNLLSDDRPISQSANLRRAVLYTINQDEMIAIEQGNSLPARSTLTPIIDTGKQGIEADSEKVEFYYNEYLNE

SEQ ID NO: 2333 - DNA, 1878 bp, Alloiococcus otitidis; identical to SEQ ID NO: 2331
  CDS (4)..(1875)

SEQ ID NO: 2334 - protein, 624 aa, Alloiococcus otitidis
MVYVMRQIQKQDKSLIQRLKQFSLCLTPLLLTGCASLQTESDLASNQVEGQEISQKDETIEILTTNDSMTSANVLRDQLVRNGFDVEFNIQPDFSSLLAQHDVGNFDITMMGWSTVTGSPDYAVRSIYHSQGDSSLIEDPYVDELIDQAATELPEDYQATYTELEDYVVEDQAYAVGTDTRYEPLAFNHEVLDPDSIVNYSAREIPWNELSYLDEGQNETRPLVTSQQYVEMTSLDPIRANDASVAAVNSNMYSRLVNLDENDEVTTDDSLSYNYVIGEGNQDYYFILRDNVNFAKVEDGQVEDTGDLVGGEDVVYSLNRAANPDSVPDHLSYSLFTMVEGAELVTDLDELASNQSSQSDASLLEELESGLDQPIQALVESDDEVDNQSGYYQVVKLTTEFPFPQVLNHLAHVASGIVSKDQVESVNDFEVEDYNPAEDRAYGDQAALMRGGSYDNHLYASGPYIMIYRDNTQAIFQKNPAYKPDSDEEAQIDQVTLRLISDATSSLSALRSGELDLLQGSEEILPVKYEVIEEENHLSLDTVVGTGVSYIQFNLLSDDRPISQSANLRRAVLYTINQDEMIAIEQGNSLPARSTLTPIIDTGKQGIEADSEKVEFYYNEYLNE

SEQ ID NO: 2335 - DNA, 459 bp, Alloiococcus otitidis
  CDS (31)..(456)
ggtttaagggtattagaggtaggtggtaggatggaccgtttagaagaagcgctcaagacctatattgccattaagcggaccaacaaccgtatgacggatgcagccaaggcggatgttacccaccatggtttaaatataaatgaatttgcggttttggaagttttgtaccacaagggtccgcagcgcatccaacatattaaagagaagattttgattgccagtagcagcacgacctatattatcgataagctggctgacaaaggctatatcgaccgggttcgggaccaggttgaccgccggatttactatgcccaactgacccggtctggtgagcaagtaatggatgagatttttcccggccatgaaaagatgatcctaaatctctttgaccggatggaagaccaggagatttacttcctaaaagaactacttaaaaaaatgaacggctatggtcagtaa

SEQ ID NO: 2336 - protein, 142 aa, Alloiococcus otitidis
MDRLEEALKTYIAIKRTNNRMTDAAKADVTHHGLNINEFAVLEVLYHKGPQRIQHIKEKILIASSSTTYIIDKLADKGYIDRVRDQVDRRIYYAQLTRSGEQVMDEIFPGHEKMILNLFDRMEDQEIYFLKELLKKMNGYGQ

SEQ ID NO: 2337 - DNA, 264 bp, Alloiococcus otitidis
  CDS (13)..(261)
gaggtgtttaagatgaaagcattgattaatatcgactatacaaacgattttgttgcggacgatggggctttgaccagtggcaaaccaggccaggacctccatgactatatcttacaaactaccaaggacttttatgaccagggggactttgtggcctttgccattgacctccaccaggcaaacgacccctaccaccctgaaagtaaactctttcccgcccataatattgaagaagtgaaggccggaacctttatggggacttag

SEQ ID NO: 2338 - protein, 83 aa, Alloiococcus otitidis
MKALINIDYTNDFVADDGALTSGKPGQDLHDYILQTTKDFYDQGDFVAFAIDLHQANDPYHPESKLFPAHNIEEVKAGTFMGT

SEQ ID NO: 2339 - DNA, 264 bp, Alloiococcus otitidis; identical to SEQ ID NO: 2337
  CDS (4)..(261)

SEQ ID NO: 2340 - protein, 86 aa, Alloiococcus otitidis
MFKMKALINIDYTNDFVADDGALTSGKPGQDLHDYILQTTKDFYDQGDFVAFAIDLHQANDPYHPESKLFPAHNIEEVKAGTFMGT

SEQ ID NO: 2341 - DNA, 78 bp, Alloiococcus otitidis
  CDS (1)..(75)
atggacgacaatatcaaagcccaagttgcaggcatcaatagccgtgtggaggatacagatattggttacaactcctag

SEQ ID NO: 2342 - protein, 25 aa, Alloiococcus otitidis
MDDNIKAQVAGINSRVEDTDIGYNS

SEQ ID NO: 2343 - DNA, 996 bp, Alloiococcus otitidis
  CDS (16)..(993)
aggagttattattacatgtcacttaagaaaagattgatccaagccggttctggtttagccctagcaggtgccttgactttcttcggtggtcaacaagcccaagccgcaacttggaccccaaatactgttgctgatattcaaaacgtcatcgaagaacaagcagccaaccaagacggtgtcattaaataccaattccaatggggcgacactctttggggtgtatctcaagcaactggtattagcttggaccaattgactcaaatcaatgatattcaaaatgctgacttaatccacgttggcactaccatttacttaagcaatgacaattctgttgtttcggtagaagaagaaaatgaaattcgctcctacgatgtttcggaagaagtcgttgtcgaaactgaaacaccagaagatgtttcagaacaaactgaagctcaagaagttgaacctagccaagaagttgctggtgaagaagcagtagcggaagaagagccagtagcagaagctcccgctgaagaaagtactgcaaaccaagaaagcacagaccaagcacaaggtcaagactacgctgttgaaaacgtcagctacaatgagccagctcaagcagaccaagcttctcaagctaaccctgagccagctccagcaccagcaagcggtggcgtttactccattgcaactagccaacttggtgcaccttatgcttgggccggaacttctccagcaggctttgactgctccggtttcgtacactgggtctatgcccaagcaggccgttccattcctcgttcaactggtggcctttactcagctgctacaccagtttctaacccacaagtaggtgacctagtattcttcggtaacggtggcgtttcccacgttggtatttacgctggtaacggccaattcatcggtgcccaaacttcaaccggtgttgcccacgctagtgtccactctggttactggggccctcgtttcatcggttacggccgcatctaa

SEQ ID NO: 2344 - protein, 326 aa, Alloiococcus otitidis
MSLKKRLIQAGSGLALAGALTFFGGQQAQAATWTPNTVADIQNVIEEQAANQDGVIKYQFQWGDTLWGVSQATGISLDQLTQINDIQNADLIHVGTTIYLSNDNSVVSVEEENEIRSYDVSEEVVVETETPEDVSEQTEAQEVEPSQEVAGEEAVAEEEPVAEAPAEESTANQESTDQAQGQDYAVENVSYNEPAQADQASQANPEPAPAPASGGVYSIATSQLGAPYAWAGTSPAGFDCSGFVHWVYAQAGRSIPRSTGGLYSAATPVSNPQVGDLVFFGNGGVSHVGIYAGNGQFIGAQTSTGVAHASVHSGYWGPRFIGYGRI

SEQ ID NO: 2345 - DNA, 738 bp, Alloiococcus otitidis
  CDS (1)..(735)
atgatcgctatcggtcgaaacggattaaaccaaagcaaggagatggggaagatgagagtcatgttgattgaagacgaccgggacatgtcagctcttattcaaatgtatttgcagcctgaaggttgggaagtagacgtttttcatatgggcaaggaagcagtcttggcctttaatcgagatagctaccagattcttttgttagacctcatgttgccagatatgactggctttgatatttgccaggctatacgcaaagagacaaccattcctatcatcatgttgaccgcactggagcagtctatccacaagattcaaggcttaaatatgggggcagatgactacattattaaaccctttgatccaggtgaattaattgcccggattagggctcaattaagacggacctatgattacgtcacaaatcctagccttgaggagactgaccaaagaagggtaaaacatttaactttaaacaagaaattccatcaagcttactatcaaaatcaagaaataaaattaacgcccaaggaatttgctattttatggttgctgatggaagatcctcagggtgtatacagtatggatgatatccacacgaggatttggggggatgcagtcctagatggtgaagttaatcctgtcatggttcatgtcagaagaattagaagtaagtttgaaaagatcggtgtcgacatcatccaaaccgtctggggagtggggtataggataaatgcttaa

SEQ ID NO: 2346 - protein, 245 aa, Alloiococcus otitidis
MIAIGRNGLNQSKEMGKMRVMLIEDDRDMSALIQMYLQPEGWEVDVFHMGKEAVLAFNRDSYQILLLDLMLPDMTGFDICQAIRKETTIPIIMLTALEQSIHKIQGLNMGADDYIIKPFDPGELIARIRAQLRRTYDYVTNPSLEETDQRRVKHLTLNKKFHQAYYQNQEIKLTPKEFAILWLLMEDPQGVYSMDDIHTRIWGDAVLDGEVNPVMVHVRRIRSKFEKIGVDIIQTVWGVGYRINA

SEQ ID NO: 2347 - DNA, 1083 bp, Alloiococcus otitidis
  CDS (157)..(1080)
atgcttaagaaaaatactttttttatagagacgatcttacttcaaatactttggctagtagcaggtttgatcttttcgtatattctcatcaacttattggacaacctggtttttgcaacaattgaccataaccaaggcttaaatttagctcaaggagtgtattatgaagcaaggccttatattatgctccttatcttaccaagtctgattgtattgggggcttttgcaatccagtataagcggttcaaaaagtatcaaagctattacgcttctggtatggcctacttgaaaggagatgcccctagcgttgagaccttccatgaatcaatggctgatgaccgcttaacctttattaacttgcggcaaaagcaagttgatatggaaagagattaccaaattgcctaccgagagaaaacggatttactgacctacctagctcacgatattaagacccccttagctaatatgctggggtataccaaactccttcacgaggaagaagacctaagccccgaccaacgagggaaatttatccaggttatttatgacaatgccaattatctgaataaactgacggaagactttttcgattatttaaaattcagcctcaatgatattcccttgcaaattgttaagctggatgtgacagttttcttctcccaatgggctgaagaaagggaattaagcttaaagaataagaccctgcaagtgacttttagcaattgccaggatataacccttcagactgacccccacctgctcttaagggttatggataacctgatcaacaatgctcaaaaatatgccttggaccaatcccaaatccatgtttatgttgctagggacgaaaagctactctcggtccaagtgatgaatgaggtggatcaagatttgacttttgattggtccaaagccaagtctcgtttttaccaaggagattattctaggaaccgactaatcaatgaaggatctggactaggcttaactattgttgatgatatcgtcagacaccttggaggtcactttgccatcgaccaaaatgaggctaaagtgacagccagtctgaccttccccctcccttaa

SEQ ID NO: 2348 - protein, 308 aa, Alloiococcus otitidis
MYYEARPYIMLLILPSLIVLGAFAIQYKRFKKYQSYYASGMAYLKGDAPSVETFHESMADDRLTFINLRQKQVDMERDYQIAYREKTDLLTYLAHDIKTPLANMLGYTKLLHEEEDLSPDQRGKFIQVIYDNANYLNKLTEDFFDYLKFSLNDIPLQIVKLDVTVFFSQWAEERELSLKNKTLQVTFSNCQDITLQTDPHLLLRVMDNLINNAQKYALDQSQIHVYVARDEKLLSVQVMNEVDQDLTFDWSKAKSRFYQGDYSRNRLINEGSGLGLTIVDDIVRHLGGHFAIDQNEAKVTASLTFPLP

SEQ ID NO: 2349 - DNA, 1083 bp, Alloiococcus otitidis; identical to SEQ ID NO: 2347
  CDS (1)..(1080)

SEQ ID NO: 2350 - protein, 360 aa, Alloiococcus otitidis
MLKKNTFFIETILLQILWLVAGLIFSYILINLLDNLVFATIDHNQGLNLAQGVYYEARPYIMLLILPSLIVLGAFAIQYKRFKKYQSYYASGMAYLKGDAPSVETFHESMADDRLTFINLRQKQVDMERDYQIAYREKTDLLTYLAHDIKTPLANMLGYTKLLHEEEDLSPDQRGKFIQVIYDNANYLNKLTEDFFDYLKFSLNDIPLQIVKLDVTVFFSQWAEERELSLKNKTLQVTFSNCQDITLQTDPHLLLRVMDNLINNAQKYALDQSQIHVYVARDEKLLSVQVMNEVDQDLTFDWSKAKSRFYQGDYSRNRLINEGSGLGLTIVDDIVRHLGGHFAIDQNEAKVTASLTFPLP

SEQ ID NO: 2351 - DNA, 393 bp, Alloiococcus otitidis
  CDS (13)..(390)
aggagaaaactaatgaagaaaatattaactaccattttattgtctgcaacattgttgaatactggcctagttgtttcagcaaaagataatcaaataccgtatgtagagggtctagggtatgaaactgatattattcagcaagaaacaagtacagtgactttatataaaaccgatagcggatggaaagattttttaggcggaagatggagccatggtgttaacgaaagatacgtatggtctaaatacgaccacaatagtaaaacacataaaactaccgttcaaggagcaggtggtaaattatcttattctggttggactaagccaggtaaaagagcttctgcttcatgggagaaagccttatttggcaacaaagcttgggctgatgtaaagtag

SEQ ID NO: 2352 - protein, 126 aa, Alloiococcus otitidis
MKKILTTILLSATLLNTGLVVSAKDNQIPYVEGLGYETDIIQQETSTVTLYKTDSGWKDFLGGRWSHGVNERYVWSKYDHNSKTHKTTVQGAGGKLSYSGWTKPGKRASASWEKALFGNKAWADVK

SEQ ID NO: 2353 - DNA, 2178 bp, Alloiococcus otitidis
  CDS (931)..(2175)
tattcaagacagcgaggaataaaaatgaaaaaaacgactgggatactgaccgtagtcctcatggtggttctaagtctgggatactttatctaccgtgacgataccgtcatgaaacaagtatttaaagaatttgatactacagttaatattgtgagcaatccagaacagataaaacagaacatcgaaacaatccaggtcctagctcaagcaaatgatttgatctttgtaaaacaagtttctccgccaaaggatagtccttatgccaagcaagagatctatttttatgttagtggtcaaggccttggaccaagtgaaaagtcaagccaagaccagcctggtctaggtcaatttgacgcagaacatctatcaactctgttaactcgaaaaaaactgcaagctaggccctttgctgagatcaatccggaagacttcaatggggactaccaggttaaggggaaagcagatagggtccaagattttgtagaccaattaaaccaaaagaccagtctagctattcaagcgaatattgatcccaacttttcccaagttagtcaatatactgtcaaacaggccttcatctatggtctttcagtctttgttttggctgcaagtttgatcttctgcttcatcatgtataatagcactctatccaaagagatatctgtagtgaatttattgggctacaataaagcagaattttcaccccacaagtccgccttccttttactagggcctagtttgctatcccttttcttatcaactttgctgctttatttcttcagccaaagcaagtccttgctccgttttatccttgcagtcaaagatttttacctcttctttactataatagtgggccttttgttcggcttagaatgtatcctcttaatgtggaaagtgcaaaaaagcaagacccttttatggttaaagggcatgcgcacttatcatagcaagctatttttgtttgctaagactgcttccctcactctagtcctctatcttttgaccctatcggtttttggtctagcaaactatttaagaatgcaaccatacttggcaagctgggataaggcacaagcttacggtaatattgcttgttcttggcctatgtcttatgaagaaaacgaccaaaaattccagagtcagattcttcctaacctaaatgacttgtgggaccaattagacgaccaaggggctatcttgtttgaaagtcccaatatgactgaattaaactcacagctaagggaagaccaagactacttaaatagtctgccttttaatgggaaatatgcctatatcaatcaaaattacttggatgtcagctccttattggatgacaagggtcaagttttaaaagattatgaaatgaaagataaggcttggactatctttgtacctgagtctttggacgtaacagaagaagaccgaagagcaattaggcaggaccattttgaccaggttttagataaagaagcaattaccgaagactacgtttttatccaagacaaacaagaagtgtttagctttgatagtcggcaaaagattagtgaaggcaatctaagggactatgtcttcatcatggtccagggcagtgaacttgacccggcttttagcattaaattaccatccctagtcaatgctagcttccatccttatctcacccagcctcaacaggcctatcagagcttgaaggagaccatcgatcaaaccaaggccagtccgtatatcctctatgtttccaatatttttaatgatatgacctaccgtattgaagaatataaaattgagagttttatttatctctttgccttcattttggctctttttatcttgttttctgtcctagctatcgaccgtgacaactatttttatagtcagggacaaaggatcgaggttttaagacttttgggctacccgcaagtggccatccataaaaggaaattagttcaaaacttcctcctttatggcttaagtattatggccctaagtgtctttttgcttgccagtgactacctgtcttcctatggtctttacagcccagagggtggttggctaaaccaattctttcctatactgaatctcttggttactttgtgcctttacctatctttcttgttggaatacaggtcttggaagaagagggagagccggatggtagaaggattgaaggagggaacttaa

SEQ ID NO: 2354 - protein, 415 aa, Alloiococcus otitidis
MRTYHSKLFLFAKTASLTLVLYLLTLSVFGLANYLRMQPYLASWDKAQAYGNIACSWPMSYEENDQKFQSQILPNLNDLWDQLDDQGAILFESPNMTELNSQLREDQDYLNSLPFNGKYAYINQNYLDVSSLLDDKGQVLKDYEMKDKAWTIFVPESLDVTEEDRRAIRQDHFDQVLDKEAITEDYVFIQDKQEVFSFDSRQKISEGNLRDYVFIMVQGSELDPAFSIKLPSLVNASFHPYLTQPQQAYQSLKETIDQTKASPYILYVSNIFNDMTYRIEEYKIESFIYLFAFILALFILFSVLAIDRDNYFYSQGQRIEVLRLLGYPQVAIHKRKLVQNFLLYGLSIMALSVFLLASDYLSSYGLYSPEGGWLNQFFPILNLLVTLCLYLSFLLEYRSWKKRESRMVEGLKEGT

SEQ ID NO: 2355 - DNA, 2178 bp, Alloiococcus otitidis; identical to SEQ ID NO: 2353
  CDS (667)..(2175)

SEQ ID NO: 2356 - protein, 503 aa, Alloiococcus otitidis
MNLLGYNKAEFSPHKSAFLLLGPSLLSLFLSTLLLYFFSQSKSLLRFILAVKDFYLFFTIIVGLLFGLECILLMWKVQKSKTLLWLKGMRTYHSKLFLFAKTASLTLVLYLLTLSVFGLANYLRMQPYLASWDKAQAYGNIACSWPMSYEENDQKFQSQILPNLNDLWDQLDDQGAILFESPNMTELNSQLREDQDYLNSLPFNGKYAYINQNYLDVSSLLDDKGQVLKDYEMKDKAWTIFVPESLDVTEEDRRAIRQDHFDQVLDKEAITEDYVFIQDKQEVFSFDSRQKISEGNLRDYVFIMVQGSELDPAFSIKLPSLVNASFHPYLTQPQQAYQSLKETIDQTKASPYILYVSNIFNDMTYRIEEYKIESFIYLFAFILALFILFSVLAIDRDNYFYSQGQRIEVLRLLGYPQVAIHKRKLVQNFLLYGLSIMALSVFLLASDYLSSYGLYSPEGGWLNQFFPILNLLVTLCLYLSFLLEYRSWKKRESRMVEGLKEGT

SEQ ID NO: 2357 - DNA, 2178 bp, Alloiococcus otitidis; identical to SEQ ID NO: 2353
  CDS (25)..(2175)

SEQ ID NO: 2358 - protein, 717 aa, Alloiococcus otitidis
MKKTTGILTVVLMVVLSLGYFIYRDDTVMKQVFKEFDTTVNIVSNPEQIKQNIETIQVLAQANDLIFVKQVSPPKDSPYAKQEIYFYVSGQGLGPSEKSSQDQPGLGQFDAEHLSTLLTRKKLQARPFAEINPEDFNGDYQVKGKADRVQDFVDQLNQKTSLAIQANIDPNFSQVSQYTVKQAFIYGLSVFVLAASLIFCFIMYNSTLSKEISVVNLLGYNKAEFSPHKSAFLLLGPSLLSLFLSTLLLYFFSQSKSLLRFILAVKDFYLFFTIIVGLLFGLECILLMWKVQKSKTLLWLKGMRTYHSKLFLFAKTASLTLVLYLLTLSVFGLANYLRMQPYLASWDKAQAYGNIACSWPMSYEENDQKFQSQILPNLNDLWDQLDDQGAILFESPNMTELNSQLREDQDYLNSLPFNGKYAYINQNYLDVSSLLDDKGQVLKDYEMKDKAWTIFVPESLDVTEEDRRAIRQDHFDQVLDKEAITEDYVFIQDKQEVFSFDSRQKISEGNLRDYVFIMVQGSELDPAFSIKLPSLVNASFHPYLTQPQQAYQSLKETIDQTKASPYILYVSNIFNDMTYRIEEYKIESFIYLFAFILALFILFSVLAIDRDNYFYSQGQRIEVLRLLGYPQVAIHKRKLVQNFLLYGLSIMALSVFLLASDYLSSYGLYSPEGGWLNQFFPILNLLVTLCLYLSFLLEYRSWKKRESRMVEGLKEGT

SEQ ID NO: 2359 - DNA, 237 bp, Alloiococcus otitidis
  CDS (1)..(234)
atgagtttaaatccactgataaaaatgactgagctttccaaacaatatggctcgcacacgattctagaccaggttaacttagaggtctatccgggtgacttgatttgtatatttggtgcaagtggtggaggaaagtcaactttattgaatatcatgggaacattagaagactaccaagctggtcacttggagtgttttaataaactggacccagtgcaaagagaaaaaaacaagtga

SEQ ID NO: 2360 - protein, 78 aa, Alloiococcus otitidis
MSLNPLIKMTELSKQYGSHTILDQVNLEVYPGDLICIFGASGGGKSTLLNIMGTLEDYQAGHLECFNKLDPVQREKNK

SEQ ID NO: 2361 - DNA, 501 bp, Alloiococcus otitidis
  CDS (130)..(498)
aagactaccaagctggtcacttggagtgttttaataaactggacccagtgcaaagagaaaaaaacaagtgaattgttaagacgaactaaaatagcttatctttttcaaaacttcgccctagtggataatatgacagttaaagaaaatatgatgctagcagtgaaatatagccagtttgaaagcaaaggccaagccatagaccaggcccttttgaaggtggggcttgaagacaaacaagaatccaagctttatgagctttccggaggacaacagcaacgtttggccctagcccggaacatggtcaaaccctttgacttgatgttagctgacgaacccactgggttattggatgaaaccaacaagcaaatggtcatgcagactttactggaactcaaccatgaaggaaaaaccattgtagttgtgagtcatgacaatgatttcaaaacaatagcaagtaaaaattatctgattaaaaataaaaaagtagaaagggtcctatag

SEQ ID NO: 2362 - protein, 123 aa, Alloiococcus otitidis
MTVKENMMLAVKYSQFESKGQAIDQALLKVGLEDKQESKLYELSGGQQQRLALARNMVKPFDLMLADEPTGLLDETNKQMVMQTLLELNHEGKTIVVVSHDNDFKTIASKNYLIKNKKVERVL

SEQ ID NO: 2363 - DNA, 501 bp, Alloiococcus otitidis; identical to SEQ ID NO: 2361
  CDS (73)..(498)

SEQ ID NO: 2364 - protein, 142 aa, Alloiococcus otitidis
MLRRTKIAYLFQNFALVDNMTVKENMMLAVKYSQFESKGQAIDQALLKVGLEDKQESKLYELSGGQQQRLALARNMVKPFDLMLADEPTGLLDETNKQMVMQTLLELNHEGKTIVVVSHDNDFKTIASKNYLIKNKKVERVL

SEQ ID NO: 2365 - DNA, 591 bp, Alloiococcus otitidis
  CDS (1)..(498)
atgattaaaaaaataatactagctttagtcggccttctttgtatcggtggtttactattagtggtgacccgtaaacaagatgaaattgatccgggccttgtggtccaaaatgatacaggcaagaattttgaggcagtgggcatcatggttgaagacaaggcagttttaaataagagtaatggagaagatttttacattcctgaagaattgcttaagggtttggatgaattctcactggtggctattaacgatagtggacaagcctggacctccccagcagttaaccctgacggtaagaaggttaccattaaaaatatggacggtggccagctgcacaccaaccaaaaagaaattgaaaaatttgacgaccctttagacatacctaatttaaacgaatggcaaatttatacagagggagatacgattcatggatcatttgatgcgaagacagaccttgcttacaccctttatattttgggcaagggtggtaagttaggcatatcagacactcaaagtggtcaaaaggtggaagctagctgggaaaaacccgacgataaactagactcctggttagttttttcaaaagcttag

SEQ ID NO: 2366 - protein, 196 aa, Alloiococcus otitidis
MIKKIILALVGLLCIGGLLLVVTRKQDEIDPGLVVQNDTGKNFEAVGIMVEDKAVLNKSNGEDFYIPEELLKGLDEFSLVAINDSGQAWTSPAVNPDGKKVTIKNMDGGQLHTNQKEIEKFDDPLDIPNLNEWQIYTEGDTIHGSFDAKTDLAYTLYILGKGGKLGISDTQSGQKVEASWEKPDDKLDSWLVFSKA

SEQ ID NO: 2367 - DNA, 288 bp, Alloiococcus otitidis
  CDS (10)..(285)
aaaagggggatgccatcttgtctgacgagctcaaccatgcttctattattgatggctgtcgtctgtcaggagcgaagattatccgggtcaaccaccaagatatggcagaccttgaggccaaggctaaagaagccagtgaaagtggacaatacggtaagattatgttcatcaccgatggggttttctctatggatggagatattgctcaaattgacaaaattgttgaaatcgctgacaagtatgacctcattacctatgtggatgatgcccacgggactggtgttttag

SEQ ID NO: 2368 - protein, 92 aa, Alloiococcus otitidis
MPSCLTSSTMLLLLMAVVCQERRLSGSTTKIWQTLRPRLKKPVKVDNTVRLCSSPMGFSLWMEILLKLTKLLKSLTSMTSLPMWMMPTGLVF

SEQ ID NO: 2369 - DNA, 1212 bp, Alloiococcus otitidis
  CDS (10)..(1209)
atagggaggatggaaaatatgtcacaaattttggaaacgtttttaaaatcgaacctggaagaattagaagaaaaaggactgctgacgaccattgatgtcctggaggaccaggggaatggtcccataattaaaattgagggccgagaactgattaactttgcctccaacaactatcttggctttgctactagacaggaactaattgatgctgatattgcagctaccaagcaatatggtgtaggagctggggctgtccggaccatcaacgggaccttagacatccaccgcaagttagaagagaagattgcagactttaaggggacagaagatgccattgcctttcagtccggttttaatggcaatattggggctatcccagccgttatgaaaaagggggatgccatcttgtctgacgagctcaaccatgcttctattattgatggctgtcgtctgtcaggagcgaagattatccgggtcaaccaccaagatatggcagaccttgaggccaaggctaaagaagccagtgaaagtggacaatacggtaagattatgttcatcaccgatggggttttctctatggatggagatattgctcaaattgacaaaattgttgaaatcgctgacaagtatgacctcattacctatgtggatgatgcccacgggactggtgttttaggtaaaggtgccgggactgttaaggagttcggccttcaagacaagattgacatgcaattaggaaccttgtctaaaggagtaggggttgtcggcggctatattgcgggttcctccctcctgatcaagtggctcaagtctcaagcaagacccttccttttctcaacctcactcaccccaggctcagctggggctattattagagctattgacctcatgcaagaccagcccgaattggtccaaaaggtttgggacaatgccaactactttaaagcagaacttaaaaagattggctacgacataggacagtcccaaacccctattaccccagtcattctgggagatgagaaactagcccaagaattttcccataagttaatggaaaaaggggtctatgctaagcctatcgtatacccaaccgtaccactagggacaggccgggtacgtaacatgcctaatgccggtcacagcaaggacatgatcgaccaagccatcaagatttaccaagaagttggccgggaattaaacattatcaactag

SEQ ID NO: 2370 - protein, 400 aa, Alloiococcus otitidis
MENMSQILETFLKSNLEELEEKGLLTTIDVLEDQGNGPIIKIEGRELINFASNNYLGFATRQELIDADIAATKQYGVGAGAVRTINGTLDIHRKLEEKIADFKGTEDAIAFQSGFNGNIGAIPAVMKKGDAILSDELNHASIIDGCRLSGAKIIRVNHQDMADLEAKAKEASESGQYGKIMFITDGVFSMDGDIAQIDKIVEIADKYDLITYVDDAHGTGVLGKGAGTVKEFGLQDKIDMQLGTLSKGVGVVGGYIAGSSLLIKWLKSQARPFLFSTSLTPGSAGAIIRAIDLMQDQPELVQKVWDNANYFKAELKKIGYDIGQSQTPITPVILGDEKLAQEFSHKLMEKGVYAKPIVYPTVPLGTGRVRNMPNAGHSKDMIDQAIKIYQEVGRELNIIN

SEQ ID NO: 2371 - DNA, 255 bp, Alloiococcus otitidis
  CDS (1)..(252)
atggtgttcggtcgcatcaccgtatcctgtggggtctggtctgctggggtttcgggcccgaagacggcaatagaagatggggcaaagaccatggcccccacttgccgggctacttccagggcattgtttagtccagtcatgttcaagttccaggcaaattgcggttctcgctcagctaccgctgacaagctggcagccaggtggacgatggtatccacctggtactttttagctacttctaaaaagcggtcataa

SEQ ID NO: 2372 - protein, 84 aa, Alloiococcus otitidis
MVFGRITVSCGVWSAGVSGPKTAIEDGAKTMAPTCRATSRALFSPVMFKFQANCGSRSATADKLAARWTMVSTWYFLATSKKRS

SEQ ID NO: 2373 - DNA, 1008 bp, Alloiococcus otitidis
  CDS (25)..(1005)
acattatcaactaggaggctaaacatggaaagagtattgattacggggtctttaggccagattgggtcggagttagccgaacgcttgcgtcaaaagcttggcccagacaaggtggttgctagtggtttagagaaagtggcccataacgcaaccgttgaagaggggatctttgaagaattagatgtgatggattatgaccgctttttagaagtagctaaaaagtaccaggtggataccatcgtccacctggctgccagcttgtcagcggtagctgagcgagaaccgcaatttgcctggaacttgaacatgactggactaaacaatgccctggaagtagcccggcaagtgggggccatggtctttgccccatcttctattgccgtcttcgggcccgaaaccccagcagaccagaccccacaggatacggtgatgcgaccgaacaccatctatggggtctccaaagtagcaggggagctcctgtgtgactactaccacaccaagtacggcctggacacccggtccgtccgttttcctggcttgatttcctacaaggttgaaccagggggcgggacaacggattatgcagtggacatttattatgaagccttgaaaaacaagacctatgcatcttatatcgacaagggaacttacatggacatgatgtttatggatgatgccatcgactgcatggtccagttgatggaggctgatccaaaccgcctagtccaccgcaatggcttcaatgtcacaggcatgtcctttgagccagaagagatcgctgcttctatccgcaactttatcccggactttgacttgacctatgaagtgaacccggacttacagaagattgctgaatcctggcctaactccttggatgattctgcagcccgagaggagtgggacttcaacccccaatatgacctagataaaatgactgaaaccatgctgaaaaaactaaccgaaaaatttaaagctgaaggggtagcgatggcagtggaaatcacctaa

SEQ ID NO: 2374 - protein, 327 aa, Alloiococcus otitidis
MERVLITGSLGQIGSELAERLRQKLGPDKVVASGLEKVAHNATVEEGIFEELDVMDYDRFLEVAKKYQVDTIVHLAASLSAVAEREPQFAWNLNMTGLNNALEVARQVGAMVFAPSSIAVFGPETPADQTPQDTVMRPNTIYGVSKVAGELLCDYYHTKYGLDTRSVRFPGLISYKVEPGGGTTDYAVDIYYEALKNKTYASYIDKGTYMDMMFMDDAIDCMVQLMEADPNRLVHRNGFNVTGMSFEPEEIAASIRNFIPDFDLTYEVNPDLQKIAESWPNSLDDSAAREEWDFNPQYDLDKMTETMLKKLTEKFKAEGVAMAVEIT

SEQ ID NO: 2375 - DNA, 345 bp, Alloiococcus otitidis
  CDS (55)..(342)
ccgacttgctcattaccctggcccacctcaatcccctttgggttccaggactggatgactacccgatggattcgatcgccggcaaggaaaagtggctcaactacggcttcaagaaccagtgcaagtttattttttaccacgacccctattacgccatggtccagtttgacacagatggaaaagaaatcgtcgactccctcaaacgtgaaaaagaagcctacctgccaaaatcagaggaatatatgcagtcctgattcttacaataagcttaaactaaaaaaatggtcattttttaacccagaccgcttaatagagacactctacttttttggggcaactgtttga

SEQ ID NO: 2376 - protein, 96 aa, Alloiococcus otitidis
MTTRWIRSPARKSGSTTASRTSASLFFTTTPITPWSSLTQMEKKSSTPSNVKKKPTCQNQRNICSPDSYNKLKLKKWSFFNPDRLIETLYFFGATV

SEQ ID NO: 2377 - DNA, 915 bp, Alloiococcus otitidis
  CDS (145)..(912)
aatcgccaccctataggagtgagaaccatgaatacccattaccagtttggccctatctccctaaccttcttagacacactccggtcctttagagacgggggcaccctcttcggccctgtccccaaggccttgtggaaccggaaaatgcctgccaacgacaacaatgaaattccggaagtgattgaccccatcctcatccaataccagtctaaaaactacctggtggatacgtcttatgggacttccaaaatgcgggagaaagacaagaaaattgccgttttagacagtgattcgcgcctggttgatagcctggcccaagaaggtcttgccccagaagacattgacgtcatcatccaaacccacatgcacgatgaccatgctggggggctaaccgagctgaaagatggacaagtgttcccagtcttcccgaatgccactatctatgtcaatgctattgaatgggaggaagtccgccaccccaacaagagaacggcaggcacctataagaaggaaaactggcaagcagtccaagaccaagtaactacctggtcagaccagcatgccctcaatgatgccatgaccctccaccacacgggaggccactcaagagggcattccatcctgtctatcaagcagggagaccaagaaattctccacctagccgacttgctcattaccctggcccacctcaatcccctttgggttccaggactggatgactacccgatggattcgatcgccggcaaggaaaagtggctcaactacggcttcaagaaccagtgcaagtttattttttaccacgacccctattacgccatggtccagtttgacacagatggaaaagaaatcgtcgactccctcaaacgtgaaaaagaagcctacctgccaaaatcagaggaatatatgcagtcctga

SEQ ID NO: 2378 - protein, 256 aa, Alloiococcus otitidis
MPANDNNEIPEVIDPILIQYQSKNYLVDTSYGTSKMREKDKKIAVLDSDSRLVDSLAQEGLAPEDIDVIIQTHMHDDHAGGLTELKDGQVFPVFPNATIYVNAIEWEEVRHPNKRTAGTYKKENWQAVQDQVTTWSDQHALNDAMTLHHTGGHSRGHSILSIKQGDQEILHLADLLITLAHLNPLWVPGLDDYPMDSIAGKEKWLNYGFKNQCKFIFYHDPYYAMVQFDTDGKEIVDSLKREKEAYLPKSEEYMQS

SEQ ID NO: 2379 - DNA, 915 bp, Alloiococcus otitidis; identical to SEQ ID NO: 2377
  CDS (28)..(912)

SEQ ID NO: 2380 - protein, 295 aa, Alloiococcus otitidis
MNTHYQFGPISLTFLDTLRSFRDGGTLFGPVPKALWNRKMPANDNNEIPEVIDPILIQYQSKNYLVDTSYGTSKMREKDKKIAVLDSDSRLVDSLAQEGLAPEDIDVIIQTHMHDDHAGGLTELKDGQVFPVFPNATIYVNAIEWEEVRHPNKRTAGTYKKENWQAVQDQVTTWSDQHALNDAMTLHHTGGHSRGHSILSIKQGDQEILHLADLLITLAHLNPLWVPGLDDYPMDSIAGKEKWLNYGFKNQCKFIFYHDPYYAMVQFDTDGKEIVDSLKREKEAYLPKSEEYMQS

SEQ ID NO: 2381 - DNA, 915 bp, Alloiococcus otitidis; identical to SEQ ID NO: 2377
  CDS (19)..(912)

SEQ ID NO: 2382 - protein, 298 aa, Alloiococcus otitidis
MRTMNTHYQFGPISLTFLDTLRSFRDGGTLFGPVPKALWNRKMPANDNNEIPEVIDPILIQYQSKNYLVDTSYGTSKMREKDKKIAVLDSDSRLVDSLAQEGLAPEDIDVIIQTHMHDDHAGGLTELKDGQVFPVFPNATIYVNAIEWEEVRHPNKRTAGTYKKENWQAVQDQVTTWSDQHALNDAMTLHHTGGHSRGHSILSIKQGDQEILHLADLLITLAHLNPLWVPGLDDYPMDSIAGKEKWLNYGFKNQCKFIFYHDPYYAMVQFDTDGKEIVDSLKREKEAYLPKSEEYMQS

SEQ ID NO: 2383 - DNA, 1560 bp, Alloiococcus otitidis
  CDS (469)..(1557)
aaacttaaaggacgtgaccctttgcaattttcaaaactaggtcgaaaacgaattatccggcttggcttgctttacctcttgcagcttgggctactagccctctttagtatattggtggcaagctctgcccaaaactacctggccctcgtcgccatctcttccctgtttttcgccaccatcattatcaattacgatacccaaccggaatttaaaatgtcttggatctttatcatcctcttcctccccatcttcggggggatcctctatctctttcttaggaagcaaacccaatggaatggctacgaggagaagttaactgaaattaataaaaaagttgacctgagtttaaaagactaccccaatatcttggaagactatccggatatggacccagatgccaagcacttaagtaattttatcaccaaaacctttaaagtcttgccctccaacaagacccactccacctatatgcccctaggagaggacctctttgaagctttgaaggaagacctgcgccaggctaaaaaatatatttttttggaattttacatattggaaaaagggaccatgttggacgaaatcctagaaatcttatttgacaaggcccaagaagggcttgacatccgacttttgtatgatgatgtggggaatattttgcggatcgatgaaaactttgtgtcctacttaaatgaaaaaggcatcaagacctcggtttttaaccccttggattggcggctgacttttcaatacaactaccgggaccaccgcaaaattatggtggttgatggcaagattggctacaccggtggcatgaatataggagataactatatcaaccgggttgagaaagcaggccactggaaggatggcggtatccgtctagaaggccagggcgtttggggctttaccaccatgttcctgtctttgtgggattatttgaatgacgatacccaggatttcagggacttccaccctgatgagtataaaagtgccaatgaagttgtgacaccaggtggctatgtccacccctttgccgatgaccccaccaaccggatccaaatttcagagagcttgtatttgaaattgatctacaatgccaaggagtccatctacctaaaaaccccttaccttatcttcagtcaaaagctctattcggccttggagaatgctgccttgtcgggggtagatgtccgcattgtgaccccaggtattccggacaagaagattgtctttgagaccacccagtctttttacgacaagttgctagaagttggtgtcaagatttatgagtatgcgcccggttttatccacgaaaaagttattattattgaccaagattttgcgattaacgggaccatcaacttcgactaccgcagcctccaccactcttttgaatgtggcgttttgttttacaatacccaaagtattatcgatatgaaaaatgattttgacaacctcttccctatctgccggcaagttagcttggaagaaaaccaagatatttcggttccccgacaaatcatgcggagcttcctgcaatttttcgctccgctgatgtag

SEQ ID NO: 2384 - protein, 363 aa, Alloiococcus otitidis
MPLGEDLFEALKEDLRQAKKYIFLEFYILEKGTMLDEILEILFDKAQEGLDIRLLYDDVGNILRIDENFVSYLNEKGIKTSVFNPLDWRLTFQYNYRDHRKIMVVDGKIGYTGGMNIGDNYINRVEKAGHWKDGGIRLEGQGVWGFTTMFLSLWDYLNDDTQDFRDFHPDEYKSANEVVTPGGYVHPFADDPTNRIQISESLYLKLIYNAKESIYLKTPYLIFSQKLYSALENAALSGVDVRIVTPGIPDKKIVFETTQSFYDKLLEVGVKIYEYAPGFIHEKVIIIDQDFAINGTINFDYRSLHHSFECGVLFYNTQSIIDMKNDFDNLFPICRQVSLEENQDISVPRQIMRSFLQFFAPLM

SEQ ID NO: 2385 - DNA, 1560 bp, Alloiococcus otitidis; identical to SEQ ID NO: 2383
  CDS (214)..(1557)

SEQ ID NO: 2386 - protein, 448 aa, Alloiococcus otitidis
MSWIFIILFLPIFGGILYLFLRKQTQWNGYEEKLTEINKKVDLSLKDYPNILEDYPDMDPDAKHLSNFITKTFKVLPSNKTHSTYMPLGEDLFEALKEDLRQAKKYIFLEFYILEKGTMLDEILEILFDKAQEGLDIRLLYDDVGNILRIDENFVSYLNEKGIKTSVFNPLDWRLTFQYNYRDHRKIMVVDGKIGYTGGMNIGDNYINRVEKAGHWKDGGIRLEGQGVWGFTTMFLSLWDYLNDDTQDFRDFHPDEYKSANEVVTPGGYVHPFADDPTNRIQISESLYLKLIYNAKESIYLKTPYLIFSQKLYSALENAALSGVDVRIVTPGIPDKKIVFETTQSFYDKLLEVGVKIYEYAPGFIHEKVIIIDQDFAINGTINFDYRSLHHSFECGVLFYNTQSIIDMKNDFDNLFPICRQVSLEENQDISVPRQIMRSFLQFFAPLM

SEQ ID NO: 2387 - DNA, 1560 bp, Alloiococcus otitidis; identical to SEQ ID NO: 2383
  CDS (115)..(1557)

SEQ ID NO: 2388 - protein, 481 aa, Alloiococcus otitidis
MASSAQNYLALVAISSLFFATIIINYDTQPEFKMSWIFIILFLPIFGGILYLFLRKQTQWNGYEEKLTEINKKVDLSLKDYPNILEDYPDMDPDAKHLSNFITKTFKVLPSNKTHSTYMPLGEDLFEALKEDLRQAKKYIFLEFYILEKGTMLDEILEILFDKAQEGLDIRLLYDDVGNILRIDENFVSYLNEKGIKTSVFNPLDWRLTFQYNYRDHRKIMVVDGKIGYTGGMNIGDNYINRVEKAGHWKDGGIRLEGQGVWGFTTMFLSLWDYLNDDTQDFRDFHPDEYKSANEVVTPGGYVHPFADDPTNRIQISESLYLKLIYNAKESIYLKTPYLIFSQKLYSALENAALSGVDVRIVTPGIPDKKIVFETTQSFYDKLLEVGVKIYEYAPGFIHEKVIIIDQDFAINGTINFDYRSLHHSFECGVLFYNTQSIIDMKNDFDNLFPICRQVSLEENQDISVPRQIMRSFLQFFAPLM

SEQ ID NO: 2389 - DNA, 1560 bp, Alloiococcus otitidis; identical to SEQ ID NO: 2383
  CDS (79)..(1557)

SEQ ID NO: 2390 - protein, 493 aa, Alloiococcus otitidis
MQLGLLALFSILVASSAQNYLALVAISSLFFATIIINYDTQPEFKMSWIFIILFLPIFGGILYLFLRKQTQWNGYEEKLTEINKKVDLSLKDYPNILEDYPDMDPDAKHLSNFITKTFKVLPSNKTHSTYMPLGEDLFEALKEDLRQAKKYIFLEFYILEKGTMLDEILEILFDKAQEGLDIRLLYDDVGNILRIDENFVSYLNEKGIKTSVFNPLDWRLTFQYNYRDHRKIMVVDGKIGYTGGMNIGDNYINRVEKAGHWKDGGIRLEGQGVWGFTTMFLSLWDYLNDDTQDFRDFHPDEYKSANEVVTPGGYVHPFADDPTNRIQISESLYLKLIYNAKESIYLKTPYLIFSQKLYSALENAALSGVDVRIVTPGIPDKKIVFETTQSFYDKLLEVGVKIYEYAPGFIHEKVIIIDQDFAINGTINFDYRSLHHSFECGVLFYNTQSIIDMKNDFDNLFPICRQVSLEENQDISVPRQIMRSFLQFFAPLM

SEQ ID NO: 2391 - DNA, 1560 bp, Alloiococcus otitidis; identical to SEQ ID NO: 2383
  CDS (22)..(1557)

SEQ ID NO: 2392 - protein, 512 aa, Alloiococcus otitidis
MQFSKLGRKRIIRLGLLYLLQLGLLALFSILVASSAQNYLALVAISSLFFATIIINYDTQPEFKMSWIFIILFLPIFGGILYLFLRKQTQWNGYEEKLTEINKKVDLSLKDYPNILEDYPDMDPDAKHLSNFITKTFKVLPSNKTHSTYMPLGEDLFEALKEDLRQAKKYIFLEFYILEKGTMLDEILEILFDKAQEGLDIRLLYDDVGNILRIDENFVSYLNEKGIKTSVFNPLDWRLTFQYNYRDHRKIMVVDGKIGYTGGMNIGDNYINRVEKAGHWKDGGIRLEGQGVWGFTTMFLSLWDYLNDDTQDFRDFHPDEYKSANEVVTPGGYVHPFADDPTNRIQISESLYLKLIYNAKESIYLKTPYLIFSQKLYSALENAALSGVDVRIVTPGIPDKKIVFETTQSFYDKLLEVGVKIYEYAPGFIHEKVIIIDQDFAINGTINFDYRSLHHSFECGVLFYNTQSIIDMKNDFDNLFPICRQVSLEENQDISVPRQIMRSFLQFFAPLM

SEQ ID NO: 2393 - DNA, 294 bp, Alloiococcus otitidis
  CDS (58)..(291)
acccagctggctgccgacttggactggtcgaccccagattcggtaccgactatcaccatgtcaatagcagccttgtcttcttcacttaagattaaattaccggcattagccgccaagctgacggcatcatcactttcttcagggacagccatggcttcttggcctagccccttgatatatttattagggtcttgggaccgggcttgggccagactcgccatttccaagtacctggttggagtcgcaaaagccagcttgtcaattcctatttgcatattgaacctcctaaaataa

SEQ ID NO: 2394 - protein, 78 aa, Alloiococcus otitidis
MSIAALSSSLKIKLPALAAKLTASSLSSGTAMASWPSPLIYLLGSWDRAWARLAISKYLVGVAKASLSIPICILNLLK

SEQ ID NO: 2395 - DNA, 294 bp, Alloiococcus otitidis; identical to SEQ ID NO: 2393
  CDS (19)..(291)

SEQ ID NO: 2396 - protein, 91 aa, Alloiococcus otitidis
MDWSTPDSVPTITMSIAALSSSLKIKLPALAAKLTASSLSSGTAMASWPSPLIYLLGSWDRAWARLAISKYLVGVAKASLSIPICILNLLK

SEQ ID NO: 2397 - DNA, 1242 bp, Alloiococcus otitidis
  CDS (70)..(1239)
aatcttcttaatatcgcttggcccaagaccgctataatagtggtaagtgattattttaggaggttcaatatgcaaataggaattgacaagctggcttttgcgactccaaccaggtacttggaaatggcgagtctggcccaagcccggtcccaagaccctaataaatatatcaaggggctaggccaagaagccatggctgtccctgaagaaagtgatgatgccgtcagcttggcggctaatgccggtaatttaatcttaagtgaagaagacaaggctgctattgacatggtgatagtcggtaccgaatctggggtcgaccagtccaagtcggcagccagctgggttcatgacctgttggggatcaacccccatgctagaagcctggagatcaagcaagcctgctacggggctacggctggactcaaactagctgtggcccacctagccttaaaccctgactccaaggttttagtcatcggttcagacatagccaagtatggtttggaaacagggggcgagcccactcaaggagctggggcggtcgccatcttagtcagccgtgaccctgcaattgctgtggtcaacaatgacagtgccatgctgaccaaaaatattgcagacttttggcgacccaactacagcgattatgcccatgtagatggcaagttctccaaccaggcatacttgtccaacctagcagaagtctggcgccagtataagatcaaaaaccagctgtctgctaaggatttcaaggccatggtcttccacagcccctataccaagatggggaaaaaggccttactcaaactaggagattatgaagaccagaaagagattgaccgcttgctggcctattacgagcctggtcgctactacaataagcgggtcggtaatatctatactgggtctctttacttgagtttgatttccctcttagaccaggtaagtgacctggaggctggcgaccggattggcctctattcttatgggtctggtgccgttggagagttctttagcattcggctccagccaggttacaaggaaagcttacagcaagttgacttcgaccaggttgtcaaccagcgttcagcattagagatgtacagctatcaggacttgctgacctttagcctacctcaagacggccaaacttacactacagataaaagtcaccaggtcccaggccgttttgtcttagaccgggtggccgaccatatccgttactaccggcgcttggcttaa

SEQ ID NO: 2398 - protein, 390 aa, Alloiococcus otitidis
MQIGIDKLAFATPTRYLEMASLAQARSQDPNKYIKGLGQEAMAVPEESDDAVSLAANAGNLILSEEDKAAIDMVIVGTESGVDQSKSAASWVHDLLGINPHARSLEIKQACYGATAGLKLAVAHLALNPDSKVLVIGSDIAKYGLETGGEPTQGAGAVAILVSRDPAIAVVNNDSAMLTKNIADFWRPNYSDYAHVDGKFSNQAYLSNLAEVWRQYKIKNQLSAKDFKAMVFHSPYTKMGKKALLKLGDYEDQKEIDRLLAYYEPGRYYNKRVGNIYTGSLYLSLISLLDQVSDLEAGDRIGLYSYGSGAVGEFFSIRLQPGYKESLQQVDFDQVVNQRSALEMYSYQDLLTFSLPQDGQTYTTDKSHQVPGRFVLDRVADHIRYYRRLA

SEQ ID NO: 2399 - DNA, 1242 bp, Alloiococcus otitidis; identical to SEQ ID NO: 2397
  CDS (40)..(1239)

SEQ ID NO: 2400 - protein, 400 aa, Alloiococcus otitidis
MVSDYFRRFNMQIGIDKLAFATPTRYLEMASLAQARSQDPNKYIKGLGQEAMAVPEESDDAVSLAANAGNLILSEEDKAAIDMVIVGTESGVDQSKSAASWVHDLLGINPHARSLEIKQACYGATAGLKLAVAHLALNPDSKVLVIGSDIAKYGLETGGEPTQGAGAVAILVSRDPAIAVVNNDSAMLTKNIADFWRPNYSDYAHVDGKFSNQAYLSNLAEVWRQYKIKNQLSAKDFKAMVFHSPYTKMGKKALLKLGDYEDQKEIDRLLAYYEPGRYYNKRVGNIYTGSLYLSLISLLDQVSDLEAGDRIGLYSYGSGAVGEFFSIRLQPGYKESLQQVDFDQVVNQRSALEMYSYQDLLTFSLPQDGQTYTTDKSHQVPGRFVLDRVADHIRYYRRLA

SEQ ID NO: 2401 - DNA, 1323 bp, Alloiococcus otitidis
  CDS (31)..(1320)
ttctggtatagattaaggaaggaggagaccatgttacccttattcaagcaattttacaagcaaagcctcagccagcgcctcaaagctctagaaaaggccggctatcttgatcctgaccaggcgggtaaactccagtcaggggaactgggtttgacccatgaagccggcgaccacatgattgaaaactacatcggctcctataccctccctctgggactggccctccactttttactcgatggcaagagctacctagtccccatggctattgaagagccctctgtcattgccgctgccagcaacggtgccaagatggtagcccaaagcggtggtttccatacagtcaaggaaaaccggctgatgatcggtcaagtggtcatagccggaagcacaaaacctagccaggaccggggaaaaatcctgagccaccagcaagacttaatcgacctagccaatgctagctatccctcaattggtaaaagagggggtggggcccgaggcattcaagtcaaacagtttgactcagacctgggccaggatatgggaagctatctggcagtctacttgactgttgactgccaggaagccatgggggctaacattatcaacaccatgctggaagccctggctcctgaaattgaccgcctaaccagcggccaggtcttgatgtccatcttatctaacctggccactgaatcccttgtcactgtttcctgtcaagtaaaacccagatttttagtcaaaaatgacatggcaggggaagctgtccgggaccaaatcatccaggcctaccagtatgcctgcctggacccctaccgggcagccacccacaacaaggggatcatgaacggggtagacggcttggtcctagctagtgggaatgattggcgggcaatcgaagcgggggcccatgcttacgctagtttgaccggccactaccgccccttgtccaagtgggaaaagacccaagacggacagttaaaagggaccattacccttcccttgccaattgccacagttggtggggctattgcctcccaccctgtagcccaagttagccagcaaatcttaggccaacctactgctaagcaattagcccggctggttgcagcagtgggactagcccagaacctatccgctcttcgtgccttagtcacaactggtattcaacaaggacacatggccctccaggcaaggtctttggccatgaatgccggggcccggggagacaagatccaaaagctggcagaccgcttaattaaccaagaccaaatgaacctagcaactgcccgtgccctgctcaagaacatggaagaagactaa

SEQ ID NO: 2402 - protein, 430 aa, Alloiococcus otitidis
MLPLFKQFYKQSLSQRLKALEKAGYLDPDQAGKLQSGELGLTHEAGDHMIENYIGSYTLPLGLALHFLLDGKSYLVPMAIEEPSVIAAASNGAKMVAQSGGFHTVKENRLMIGQVVIAGSTKPSQDRGKILSHQQDLIDLANASYPSIGKRGGGARGIQVKQFDSDLGQDMGSYLAVYLTVDCQEAMGANIINTMLEALAPEIDRLTSGQVLMSILSNLATESLVTVSCQVKPRFLVKNDMAGEAVRDQIIQAYQYACLDPYRAATHNKGIMNGVDGLVLASGNDWRAIEAGAHAYASLTGHYRPLSKWEKTQDGQLKGTITLPLPIATVGGAIASHPVAQVSQQILGQPTAKQLARLVAAVGLAQNLSALRALVTTGIQQGHMALQARSLAMNAGARGDKIQKLADRLINQDQMNLATARALLKNMEED

SEQ ID NO: 2403 - DNA, 777 bp, Alloiococcus otitidis
  CDS (184)..(774)
gattggcttggatgttctagatacttacggtcccatgctgtcttaggcctagccaaggaaaaccgacccatgctagaacttcgggcaagtaagaaagaaaaaactagtcaggctcatcctggtctctaccactttgccatcctcctccccagcagaagggacttggccaacatcctctttaccatgattacccagaaaaatatggacattcaaggggcttctgaccaaggcttcagcgaatccatctacctagaagatccagaaggcaataccattgaactgagccgggacaaggaccctgacctgtggcctgttttagaagatgggtccatccccagccaaaccaaggacttggatgttaatggggttttggatgagaaggatgttgaagcttacgacggcttgccggagggaacccggctcggccatatccacttgatggtttctgatttagatcagtcacaacacttctaccaagaccaacttggctttgacctgaaatacgatggcgatggggccttgtttttcgctactggtttttaccaccaccagctagccctcaatgccttcactactgaaaaatgccagccacttgaaccaggccaacccggcttaagctcctttagcctagtcatagacgaaaaagagtcctttgaccaattactggaccggctaactggtttaagggaagtaaaccaagtcagttcaaccagtttcaaagtcaccgacccggacggcctggtcatcctcattgaatttgattctggtatagattaa

SEQ ID NO: 2404 - protein, 197 aa, Alloiococcus otitidis
MITQKNMDIQGASDQGFSESIYLEDPEGNTIELSRDKDPDLWPVLEDGSIPSQTKDLDVNGVLDEKDVEAYDGLPEGTRLGHIHLMVSDLDQSQHFYQDQLGFDLKYDGDGALFFATGFYHHQLALNAFTTEKCQPLEPGQPGLSSFSLVIDEKESFDQLLDRLTGLREVNQVSSTSFKVTDPDGLVILIEFDSGID

SEQ ID NO: 2405 - DNA, 777 bp, Alloiococcus otitidis; identical to SEQ ID NO: 2403
  CDS (70)..(774)

SEQ ID NO: 2406 - protein, 235 aa, Alloiococcus otitidis
MLELRASKKEKTSQAHPGLYHFAILLPSRRDLANILFTMITQKNMDIQGASDQGFSESIYLEDPEGNTIELSRDKDPDLWPVLEDGSIPSQTKDLDVNGVLDEKDVEAYDGLPEGTRLGHIHLMVSDLDQSQHFYQDQLGFDLKYDGDGALFFATGFYHHQLALNAFTTEKCQPLEPGQPGLSSFSLVIDEKESFDQLLDRLTGLREVNQVSSTSFKVTDPDGLVILIEFDSGID

SEQ ID NO: 2407 - DNA, 633 bp, Alloiococcus otitidis
  CDS (34)..(630)
caagttcatatgttagaggagatgaaaggatccatgaagttccaactcaagacccaggatattattttgaccttggcctatactgctatttactttttgatcattgcggtgtcggctatgctaacggtctttttaattccaggttattcttttatttttattcccattttaattgcccttttggccggtagtgtttactaccttttggctttaaaagttcctaaatttggagccattaccttgatggccggtgtgattggggtcttttacttaattagcggtcgctaccccctagctattttacttagcatattatttggcttgttggcagattggattgctcggaaagggaattatctggattccaagcttctttttatttcatacctagtctttactttttcaaatattggtccagtccttcccatctttgtcttccaatcctcctacaccgaccatatcgaagggactggccagagtgtcagccaggttcaaagggtcttttcttcgattaactttactagtgcccttattgtcttgcttgctttggtcattgcgggcattattggggcctggatcgggcgaaccttaattaacaaacactttgtccaggatgaagccagtggtaagtaa

SEQ ID NO: 2408 - protein, 199 aa, Alloiococcus otitidis
MKFQLKTQDIILTLAYTAIYFLIIAVSAMLTVFLIPGYSFIFIPILIALLAGSVYYLLALKVPKFGAITLMAGVIGVFYLISGRYPLAILLSILFGLLADWIARKGNYLDSKLLFISYLVFTFSNIGPVLPIFVFQSSYTDHIEGTGQSVSQVQRVFSSINFTSALIVLLALVIAGIIGAWIGRTLINKHFVQDEASGK

SEQ ID NO: 2409 - DNA, 633 bp, Alloiococcus otitidis; identical to SEQ ID NO: 2407
  CDS (10)..(630)

SEQ ID NO: 2410 - protein, 207 aa, Alloiococcus otitidis
MLEEMKGSMKFQLKTQDIILTLAYTAIYFLIIAVSAMLTVFLIPGYSFIFIPILIALLAGSVYYLLALKVPKFGAITLMAGVIGVFYLISGRYPLAILLSILFGLLADWIARKGNYLDSKLLFISYLVFTFSNIGPVLPIFVFQSSYTDHIEGTGQSVSQVQRVFSSINFTSALIVLLALVIAGIIGAWIGRTLINKHFVQDEASGK

SEQ ID NO: 2411 - DNA, 729 bp, Alloiococcus otitidis
  CDS (307)..(726)
ttaacaaacactttgtccaggatgaagccagtggtaagtaagcaaccggccatagatttaaggaccaagttaattttccttttggctgccccacaactgatcctctttaacatccccttttggatcgaaataatcctggtcctactctatctttctctcttcctgttctcaagggactacaaatggatcattttcttcttagtggtttatagcctgcaagtcttggtctttaacctacttggccaagttaatctccaccccttcctcttgtttatcttatctttcttatcgattggtttaaggcagatgattttaagcattattgctggggcttttttactgaaaacgaccgctatcagtgaatggacagccaccctgaccaagctaaaagcacccaagggacttacgattggagtggcagtcttgacccggtttatcatcaccgtcatccatgactttaaccggatccggcaagccctcttggtgcgggggattgacttttcacccaagcgggtcctaacccacccggtcaatgcctttgaataccttattattcccttgttaatgaatacttcttttactgcccgtgacttgaccattgctgccttgactaagggcttggatagtaaggcgcaacagaccagctaccggacctataccttgtctggtattgactatagctactggcttgccctggccgtggtaacgattggagggatactagcatga

SEQ ID NO: 2412 - protein, 140 aa, Alloiococcus otitidis
MILSIIAGAFLLKTTAISEWTATLTKLKAPKGLTIGVAVLTRFIITVIHDFNRIRQALLVRGIDFSPKRVLTHPVNAFEYLIIPLLMNTSFTARDLTIAALTKGLDSKAQQTSYRTYTLSGIDYSYWLALAVVTIGGILA

SEQ ID NO: 2413 - DNA, 729 bp, Alloiococcus otitidis; identical to SEQ ID NO: 2411
  CDS (22)..(726)

SEQ ID NO: 2414 - protein, 235 aa, Alloiococcus otitidis
MKPVVSKQPAIDLRTKLIFLLAAPQLILFNIPFWIEIILVLLYLSLFLFSRDYKWIIFFLVVYSLQVLVFNLLGQVNLHPFLLFILSFLSIGLRQMILSIIAGAFLLKTTAISEWTATLTKLKAPKGLTIGVAVLTRFIITVIHDFNRIRQALLVRGIDFSPKRVLTHPVNAFEYLIIPLLMNTSFTARDLTIAALTKGLDSKAQQTSYRTYTLSGIDYSYWLALAVVTIGGILA

SEQ ID NO: 2415 - DNA, 729 bp, Alloiococcus otitidis; identical to SEQ ID NO: 2411
  CDS (13)..(726)

SEQ ID NO: 2416 - protein, 238 aa, Alloiococcus otitidis
MSRMKPVVSKQPAIDLRTKLIFLLAAPQLILFNIPFWIEIILVLLYLSLFLFSRDYKWIIFFLVVYSLQVLVFNLLGQVNLHPFLLFILSFLSIGLRQMILSIIAGAFLLKTTAISEWTATLTKLKAPKGLTIGVAVLTRFIITVIHDFNRIRQALLVRGIDFSPKRVLTHPVNAFEYLIIPLLMNTSFTARDLTIAALTKGLDSKAQQTSYRTYTLSGIDYSYWLALAVVTIGGILA

SEQ ID NO: 2417 - DNA, 1488 bp, Alloiococcus otitidis
  CDS (46)..(1485)
ctactggcttgccctggccgtggtaacgattggagggatactagcatgacctatttaaggatagaagctggccgtttttcctaccaggggtcaaaagagactcaaattgagatagaggacctgagtctcaaccaaggggagaccttggtggtttgtggcaattcggggtcaggcaagtcaaccttgaccaacctattaaacgggatcagccctgaatatattgaaggtcaggtccaaggtaaatttgaactggcccacctgcaagctggcaagaatggcttagatgattatgtagggattgtgggcagtgtttttcaaaacccgagaactcagcactttaccctcaataccactgatgaagttgtccttccttgtgaaaatattggactggaccaggccagtatccaaaagcgtctagactgggtggttgacctaatggggattgacaacttgctggaccggcccatctttgacttgtcaggaggggagaagcagttaattgccctggcttcgaccttgatcttacacccccaagtcctaattttagatgaggtttccagtaacttagaccaggctgccattgaccgaatcaaggggattgtggggaccttgcagtgccaagggatgactttgcttatcatagaccaccgactagagtggactaggggcttggcagactattacctgaaattagccggcggaagagtcgaaaaagtctgggaccatgaagcttttcaggccatgactgaagatgacttggcccaaattggcttgcggaccaacaagtcaatcttaaggtctgacctccacttttccaaagatcctgtatttaaaccagtattggatttaaaccagctagcagttggctatgactttcccttgttagaagggatcaacttggctttttcttatggggaagtgacggctgtgatcggccccattggaataggcaagtcgaccctggctgatgtgatggtgggcctccgccaacctttgaaaggccagattaaatggaagcgggctaaccaagaccggaaaagtttactggcgaagagttttattgttatgcaggatgtcaactaccagctcttccaccacaccgtttggcatgagttggtggtgggcaccaagtgggaagaggcagatccacaagatgaggacaacttacctaaccggctcttagatcgtctggacatcaagggcttgaagaaccgccaccccatgaccttatcaggtggggaaaaacagcgggtcctcattgcttcggccattgtctcaggcaaggaaatcttgatttttgatgaacccaccagtggctttgactatgaccacatggtccgttttggtcaaatattgcaaaacttaaaagatgagcaagtagttatgctcgtctttacccatgactatgaactggccaagcactggtgtgaccgggtagtggacattgaagactaccgcactagcaaaaacctaaaacttaactattaa

SEQ ID NO: 2418 - protein, 480 aa, Alloiococcus otitidis
MTYLRIEAGRFSYQGSKETQIEIEDLSLNQGETLVVCGNSGSGKSTLTNLLNGISPEYIEGQVQGKFELAHLQAGKNGLDDYVGIVGSVFQNPRTQHFTLNTTDEVVLPCENIGLDQASIQKRLDWVVDLMGIDNLLDRPIFDLSGGEKQLIALASTLILHPQVLILDEVSSNLDQAAIDRIKGIVGTLQCQGMTLLIIDHRLEWTRGLADYYLKLAGGRVEKVWDHEAFQAMTEDDLAQIGLRTNKSILRSDLHFSKDPVFKPVLDLNQLAVGYDFPLLEGINLAFSYGEVTAVIGPIGIGKSTLADVMVGLRQPLKGQIKWKRANQDRKSLLAKSFIVMQDVNYQLFHHTVWHELVVGTKWEEADPQDEDNLPNRLLDRLDIKGLKNRHPMTLSGGEKQRVLIASAIVSGKEILIFDEPTSGFDYDHMVRFGQILQNLKDEQVVMLVFTHDYELAKHWCDRVVDIEDYRTSKNLKLNY

SEQ ID NO: 2419 - DNA, 912 bp, Alloiococcus otitidis
  CDS (64)..(909)
atgtacgagcaaattcgttcaaacaaacgaaaaaccttcttgattgtgggctttttcatcctagtgatcatgctcattatggccctggccggctatatttttgctggcaacttcctaaccggaatggttattggcttgattgtgggaggcttgtatatcgccttggccgtaaattctgccccttcttccatgctgcagatgaccaaggccaagcaaatccaccagggcaagtatgattccatcaaagaacagcaagtctacaatattgttagccagttagccatgatgcaaaacttgccccagcctaaggtgtatgtcgtaaaagacaagcagcccaacgcctttgccatcggtatgaaaccggaaaatgccagtgttgcagtcactactggacttttgggccggctaaaccgggcggaaattgagggggtaatcgcccatgaaatttcccatatccaaaactacgactccagactcaaagtaaccacctttgccttggggagctttctcatcctagtgggccattttctcttccggtcaggccaatttggcatgatgcgaccagcccggtcaagggaccgggataatgactcgggtattttagtcgttttcatcggttttttactgggttttttgatcttgatctttggccacttattcagccgtctcatccaaatgtgggtctcgcgtaaccgggaatacctggcagatgccagtgcagctgaaatgacccgaaaccctgacgccctagccagtgccctgatgaaaatctcccagatggatcccagtgaagtggccgactcttctatgagtgccatgtacttttacaaccccttcaaaaaaaccggcgattccatttggagcacccacccttctacccaaaaccggatcaaggccttaaaaagactttaa

SEQ ID NO: 2420 - protein, 282 aa, Alloiococcus otitidis
MIMLIMALAGYIFAGNFLTGMVIGLIVGGLYIALAVNSAPSSMLQMTKAKQIHQGKYDSIKEQQVYNIVSQLAMMQNLPQPKVYVVKDKQPNAFAIGMKPENASVAVTTGLLGRLNRAEIEGVIAHEISHIQNYDSRLKVTTFALGSFLILVGHFLFRSGQFGMMRPARSRDRDNDSGILVVFIGFLLGFLILIFGHLFSRLIQMWVSRNREYLADASAAEMTRNPDALASALMKISQMDPSEVADSSMSAMYFYNPFKKTGDSIWSTHPSTQNRIKALKRL

SEQ ID NO: 2421 - DNA, 912 bp, Alloiococcus otitidis; identical to SEQ ID NO: 2419
  CDS (1)..(909)

SEQ ID NO: 2422 - protein, 303 aa, Alloiococcus otitidis
MYEQIRSNKRKTFLIVGFFILVIMLIMALAGYIFAGNFLTGMVIGLIVGGLYIALAVNSAPSSMLQMTKAKQIHQGKYDSIKEQQVYNIVSQLAMMQNLPQPKVYVVKDKQPNAFAIGMKPENASVAVTTGLLGRLNRAEIEGVIAHEISHIQNYDSRLKVTTFALGSFLILVGHFLFRSGQFGMMRPARSRDRDNDSGILVVFIGFLLGFLILIFGHLFSRLIQMWVSRNREYLADASAAEMTRNPDALASALMKISQMDPSEVADSSMSAMYFYNPFKKTGDSIWSTHPSTQNRIKALKRL

SEQ ID NO: 2423 - DNA, 579 bp, Alloiococcus otitidis
  CDS (22)..(576)
aggaccttaggaggtaaagttatggaatggattattggtcttattatcttaattgtcattttggcaattttatttagcatgtataacagtttggtccgcttacggaatgcagcggggcaatttttctcccagattgacgtggaactggaaagacggaatgacctagttcccaacctagtcaacaccgttaagggctatgctagccacgagaaggaagttctagaagaagttaccaaggctagacagcacttaatcaacctaccccaaggagctactaataaggaaaaacttgctgcttcagatgacttgtccaatgccttgagtcgattgctggccgtttcagaaagttaccctgacttgaaggccaaccaaaactttctttccctacaagaggaattaaccaatacagaaaaccgtatctctggctctcgtcaggcttacaaccggtccgtgatgaactacaacaacaagatccaatcagttccccacaatattattgccggcctcttcaacttcactgagatgacctacctggaaattccagattctaaacgcgaagttcctaatgtatctttttaa

SEQ ID NO: 2424 - protein, 185 aa, Alloiococcus otitidis
MEWIIGLIILIVILAILFSMYNSLVRLRNAAGQFFSQIDVELERRNDLVPNLVNTVKGYASHEKEVLEEVTKARQHLINLPQGATNKEKLAASDDLSNALSRLLAVSESYPDLKANQNFLSLQEELTNTENRISGSRQAYNRSVMNYNNKIQSVPHNIIAGLFNFTEMTYLEIPDSKREVPNVSF

SEQ ID NO: 2425 - DNA, 1005 bp, Alloiococcus otitidis
  CDS (10)..(1002)
gtggttaaaatgaaagaaaatgtaaagaaggcttgggtcatttcccttgccatgctggctttggtcttgatgacctggttagttgaccggacccaggccgaagaagaggaggagtccattgaccaagtttatttaaatcaatatttaaaaacggacgagaccatccccacccttgatgaactggttgaagacttgggacaggatccgagtgtggaagcagtagaggctgagttcggtggcaaaacagctgccttatttgaccaagatctcttaccttttgaagcagccttaccaaagcttgaccagggtgaagacttgcaagccattgaacgctattattatgaccaagtcgtcaccggtatctctcccgtcaggccaagctatacgatagaagaagaaggtttccagcttgcccaccataagccccatgtttctttagagaatgaggccttgtttgtagaccaaactggctttaagcgggtcagcgactggcttaaggctggctatttccaagtttaccctaaaggtcaaggcattcttgttgtggaaggcctcgttcaggtgaccgaagacaagaacttggctgatgtgattaacttggtcaattccttacaggtcgacttagcgggccaagaagtcaagagctttcctagtttactggaagaggaagacttgcaagttgaggactggagcaatttagaccaggccgacaacttccgctaccaagaagcgggtttgtctagccaggactatctacaagcccaagaggaatttacttttttagagccagacttgtatggctacttggattctcctacttccaagcaagacctaaaagtaatggacaataccatcttaacctttaaaggctttttggctgatgtagacatggacagcttggaagaaagtcacttgtcgatgaacaaggcgtcatggggcctggaggaaactgaggagaggaccatagaggttacggttagggtttgcccccgaccgtttggataa

SEQ ID NO: 2426 - protein, 331 aa, Alloiococcus otitidis
MKENVKKAWVISLAMLALVLMTWLVDRTQAEEEEESIDQVYLNQYLKTDETIPTLDELVEDLGQDPSVEAVEAEFGGKTAALFDQDLLPFEAALPKLDQGEDLQAIERYYYDQVVTGISPVRPSYTIEEEGFQLAHHKPHVSLENEALFVDQTGFKRVSDWLKAGYFQVYPKGQGILVVEGLVQVTEDKNLADVINLVNSLQVDLAGQEVKSFPSLLEEEDLQVEDWSNLDQADNFRYQEAGLSSQDYLQAQEEFTFLEPDLYGYLDSPTSKQDLKVMDNTILTFKGFLADVDMDSLEESHLSMNKASWGLEETEERTIEVTVRVCPRPFG

SEQ ID NO: 2427 - DNA, 1005 bp, Alloiococcus otitidis; identical to SEQ ID NO: 2425
  CDS (1)..(1002)

SEQ ID NO: 2428 - protein, 334 aa, Alloiococcus otitidis
MVKMKENVKKAWVISLAMLALVLMTWLVDRTQAEEEEESIDQVYLNQYLKTDETIPTLDELVEDLGQDPSVEAVEAEFGGKTAALFDQDLLPFEAALPKLDQGEDLQAIERYYYDQVVTGISPVRPSYTIEEEGFQLAHHKPHVSLENEALFVDQTGFKRVSDWLKAGYFQVYPKGQGILVVEGLVQVTEDKNLADVINLVNSLQVDLAGQEVKSFPSLLEEEDLQVEDWSNLDQADNFRYQEAGLSSQDYLQAQEEFTFLEPDLYGYLDSPTSKQDLKVMDNTILTFKGFLADVDMDSLEESHLSMNKASWGLEETEERTIEVTVRVCPRPFG

SEQ ID NO: 2429 - DNA, 873 bp, Alloiococcus otitidis
  CDS (1)..(870)
atgaccaagaaaaaatggattgtcgtggccatcgctgccatattgctagtggtttcgggtatgtcccgcctaggccttcatgatgatggtgctggggaaggctttttggaccaatataaccccgcccactacttatttgctagctcggaagcttatattgaggttttggagccgggtgactccgactcgggcatcttagtcctgcctgttcacggagtgataggagttgatggagaaggctacaaccacgaattgctgttaacagccatcgaatcggccaaaaccgaccccagtgtccaagcaattttactggatatcgatagtccaggcgggtctgtctaccacacccatgaactctatacagccttgatggaggttaaagaggaaagaaacctgcctatctatgcctctatgggttctgtggcagccagtgggggttactatttagccatggcagctgaccaggtctttgccagccccgaaagcttgacggggtctatcggggtcattatgtcccagctggacttgagtgaactgatggatgaatttggggtgaaagagaaggttatcaagtcaggggaaatgaaagacattatgtcacctagccgggagatgaccccagcggaagaagacttgctacaaagttatgttgatgagtcctttgatgcctttgtagcggttgtggaccaaggacgggataatttaaatgaggaggaaatccgtgacttagcggacggtcggatttatagcggacgtcaggctcaaagggaaggcttgatcgatgaacttggcttctttaagggatgccctagcccagctgagacaagaccaaggcctggaagaagcggaggtctactcttttgcccaagatga

SEQ ID NO: 2430 - protein, 290 aa, Alloiococcus otitidis
MTKKKWIVVAIAAILLVVSGMSRLGLHDDGAGEGFLDQYNPAHYLFASSEAYIEVLEPGDSDSGILVLPVHGVIGVDGEGYNHELLLTAIESAKTDPSVQAILLDIDSPGGSVYHTHELYTALMEVKEERNLPIYASMGSVAASGGYYLAMAADQVFASPESLTGSIGVIMSQLDLSELMDEFGVKEKVIKSGEMKDIMSPSREMTPAEEDLLQSYVDESFDAFVAVVDQGRDNLNEEEIRDLADGRIYSGRQAQREGLIDELGFFKGCPSPAETRPRPGRSGGLLFCPR

SEQ ID NO: 2431 - DNA, 234 bp, Alloiococcus otitidis
  CDS (4)..(231)
tcgatgaacttggcttctttaagggatgccctagcccagctgagacaagaccaaggcctggaagaagcggaggtctactcttttgcccaagatgatccttttgacctgttcgggaattttcccttctttaaaaatgacgatctagacctcgtgtcccaactagaagaactcgaccaggctcaaggtctttccctcgactacctctggaagggagggctgtctaatggccagtaa

SEQ ID NO: 2432 - protein, 76 aa, Alloiococcus otitidis
MNLASLRDALAQLRQDQGLEEAEVYSFAQDDPFDLFGNFPFFKNDDLDLVSQLEELDQAQGLSLDYLWKGGLSNGQ

SEQ ID NO: 2433 - DNA, 609 bp, Alloiococcus otitidis
  CDS (115)..(606)
aagaactcgaccaggctcaaggtctttccctcgactacctctggaagggagggctgtctaatggccagtaagttaagcctagacagggtcagccaggctatcaaagactttcgtttgcccaagctgtttttagctggtttttggatccggtttttagcctttcttttcgatgtcttagttatcaaggcaatccaagccatccttttgaacctaaccctctaccggctttttagtccggccatccaggacagtttttgggtaagcctggtggaactcgtgatttttgtcctttattttttcctaaccactttgttttttaagggtcaaacccccggcaaaatcctctttgaccttcgagtaatctctttgtcatcagaagaaaatgacttcaaagtttacttattccgggaattctttggcaaggtcttgttttactactttccttacattgcagttcttttagttttttcagagaagaaccagcacctgattgacttcttagtggatacgacggtcattagggagtcccggctggaagaagtgaaccagtatttgtctcaaggtggaaatgaccaggcaggcgaagaatcgacacctgtaaccgactaa

SEQ ID NO: 2434 - protein, 164 aa, Alloiococcus otitidis
MPKLFLAGFWIRFLAFLFDVLVIKAIQAILLNLTLYRLFSPAIQDSFWVSLVELVIFVLYFFLTTLFFKGQTPGKILFDLRVISLSSEENDFKVYLFREFFGKVLFYYFPYIAVLLVFSEKNQHLIDFLVDTTVIRESRLEEVNQYLSQGGNDQAGEESTPVTD

SEQ ID NO: 2435 - DNA, 609 bp, Alloiococcus otitidis; identical to SEQ ID NO: 2433
  CDS (61)..(606)

SEQ ID NO: 2436 - protein, 182 aa, Alloiococcus otitidis
MASKLSLDRVSQAIKDFRLPKLFLAGFWIRFLAFLFDVLVIKAIQAILLNLTLYRLFSPAIQDSFWVSLVELVIFVLYFFLTTLFFKGQTPGKILFDLRVISLSSEENDFKVYLFREFFGKVLFYYFPYIAVLLVFSEKNQHLIDFLVDTTVIRESRLEEVNQYLSQGGNDQAGEESTPVTD

SEQ ID NO: 2437 - DNA, 798 bp, Alloiococcus otitidis
  CDS (1)..(795)
atgaaaggtgatcatgtggctatttttacaggtacgctcttttcggaatatttagataaaaaggtgaaatttcgggctattgtcccaacaccgggtccaagcaaggaagctgatgtggagaccaaggctcctttaaagaccctttaccttttgcacggttggaatggaaattatgaagactggacttactattctgacatcttgatgcttgcagaacaaaatagcctagcggtcattatgccggacggggagaacagtttttactccgaccatattactggggcccagtacgggaagttttaccaaaaagagttggtcgaaaagacccgcttcctctttcctttgtcagacaagagggaagatacctttgttgccggtctttccatgggtggttatggggccttgcggatcggtttaacttgtcctgagacctttggcaaaattggggccctgtcgagtcccatcttctatgagggcctatacagccaggtggaaactgaagagattggcggcttgattgtagacaccttactcagtttgttcaagaaaaacccgaatggcgacttccaccccgacaatgacatctataagctagtggaaaaggctaatccaatgccagacttgtatttggcttgtggccagtcggatgaattaatcaaactcaatgaagacttccaccaatggttgactgctcgggggattgcccaccactatgtaaccgggccaggagagcacttgtggccctactggaatgaacaattacccttacttttggattggcttttagataaaaactaa

SEQ ID NO: 2438 - protein, 265 aa, Alloiococcus otitidis
MKGDHVAIFTGTLFSEYLDKKVKFRAIVPTPGPSKEADVETKAPLKTLYLLHGWNGNYEDWTYYSDILMLAEQNSLAVIMPDGENSFYSDHITGAQYGKFYQKELVEKTRFLFPLSDKREDTFVAGLSMGGYGALRIGLTCPETFGKIGALSSPIFYEGLYSQVETEEIGGLIVDTLLSLFKKNPNGDFHPDNDIYKLVEKANPMPDLYLACGQSDELIKLNEDFHQWLTARGIAHHYVTGPGEHLWPYWNEQLPLLLDWLLDKN

SEQ ID NO: 2439 - DNA, 303 bp, Alloiococcus otitidis
  CDS (28)..(300)
aaactaaacattcaaaggaggattataatggattttaaagaagaacaaggacaaattgtaacggaagtagacggcaaggtcgttggctctattaagttccgtgaccaaggcgaccaggttttggaagcttattccacctttgtggacgattcacagcggggccaaggtttagcccgtcagctagtcgaccaattagtagcaaaagcagaaaaagaaggcaaaaaaattaaaccatcttgttcctatgttgaaagtctctttcagaaagaaaaagagacatacggccatattgaagcagaataa

SEQ ID NO: 2440 - protein, 91 aa, Alloiococcus otitidis
MDFKEEQGQIVTEVDGKVVGSIKFRDQGDQVLEAYSTFVDDSQRGQGLARQLVDQLVAKAEKEGKKIKPSCSYVESLFQKEKETYGHIEAE

SEQ ID NO: 2441 - DNA, 342 bp, Alloiococcus otitidis
  CDS (61)..(339)
tataattataatgaatttattatagatttaggaatggaggaggaaagggtgtttcaaagaatgaagaagaaacagtttacccctgttgatctgattatcttacacttggccatcagcctggtgtatatcttttttgcctggctattcacaaaagccagccttatatggcccatctttatcctggtcttggctagccaaaccctgggtagtttggtagcctattacttcatgaaccaaaaaagttatgatgctgttgcttttgatcgctttttatcaatccttgtagtctctagcctgattgccctcgtcgttggggttggcttttcttttttattgttctag

SEQ ID NO: 2442 - protein, 93 aa, Alloiococcus otitidis
MKKKQFTPVDLIILHLAISLVYIFFAWLFTKASLIWPIFILVLASQTLGSLVAYYFMNQKSYDAVAFDRFLSILVVSSLIALVVGVGFSFLLF

SEQ ID NO: 2443 - DNA, 342 bp, Alloiococcus otitidis; identical to SEQ ID NO: 2441
  CDS (34)..(339)

SEQ ID NO: 2444 - protein, 102 aa, Alloiococcus otitidis
MEEERVFQRMKKKQFTPVDLIILHLAISLVYIFFAWLFTKASLIWPIFILVLASQTLGSLVAYYFMNQKSYDAVAFDRFLSILVVSSLIALVVGVGFSFLLF

SEQ ID NO: 2445 - DNA, 855 bp, Alloiococcus otitidis
  CDS (13)..(852)
tggaggtgctatatgccaatcgatatatccttagactcgattttatcttggtcgaccctctctagtattgtcgacattatcattgtttcttttgttgtctaccagttgattaaaattattcgggggacccggattaatgaactactcaacggtattttaatcatcttagtggttaaagtggtgtcttccgttttaaacttggaaacaactgaatatattattgactttattatccaatggtcagccttggccttaataatcatcttccagcctgaactcagaaggggcttggagcacctgggccgggggtcagtctttgctaaaaaaagacggtccaatccaagtgaaaaaatgattgatgcccttgcttctgccatctcctatatgagtaagagacggatcggtgccttaatttccattgaaggggaaacagcccttgatgaatatattgataccggaacagatgttaacggtgatatctcaagggaattattaattaacatctttattcccaacacccctctccacgatggggccgtgattatcaaggattttaagatagcttcagcagctagttacctacccttgtctgagagtccagccatccctaaaaaatttgggacccggcaccgggcagctattggtttgtccgagcaatcagatgccatcaccttgattgtttctgaagagacgggtgagattagtatttcacataatggtaacattttaaatggtatcagcagtgaggaaatggtggattacttaaacaaacatttggtgaatgaagaagataaccaagaaggcttctttaacaacttacttgacagggtcaaaaaaggagtgtccggtgaatga

SEQ ID NO: 2446 - protein, 280 aa, Alloiococcus otitidis
MPIDISLDSILSWSTLSSIVDIIIVSFVVYQLIKIIRGTRINELLNGILIILVVKVVSSVLNLETTEYIIDFIIQWSALALIIIFQPELRRGLEHLGRGSVFAKKRRSNPSEKMIDALASAISYMSKRRIGALISIEGETALDEYIDTGTDVNGDISRELLINIFIPNTPLHDGAVIIKDFKIASAASYLPLSESPAIPKKFGTRHRAAIGLSEQSDAITLIVSEETGEISISHNGNILNGISSEEMVDYLNKHLVNEEDNQEGFFNNLLDRVKKGVSGE

SEQ ID NO: 2447 - DNA, 711 bp, Alloiococcus otitidis
  CDS (37)..(708)
ccatcgttaatattcaagccgtcgggtgaagccccaatgacgtcaaattccgtgtctaaatcagcaaagagtcggttaatcaagggactagcagccccattggccccatccaagacaatttttaagccagacaagtcgccggaaatggtttgggataggaattgggtatattttagactgccttcattaaactcttcagaagtccctaaaccttgggcagcaggccgaggaaagtcgtcttctccgctatccaacaagctttcgatttccgcttcttgttggtcggataatttaaagccgtccggaccaaaaaacttgatcccattgtcttcgactgggttgtgggaagccgagatcataataccagctgcagcattctgggaccgggtcaaaaatgacacaccaggcgtagtgatcactcctagtcgcaaaacttctgctccagctgacaaaaggccagaaacgagagcatattctagcatacggcaactgattctggtatcccttccgactaaaacttgtggctggccttcttcaacatggcgggacaagacaatagctccgaaccgtcctaacttaaaagctaactctggcgtcaattcctggttggctatgcctcttacaccatctgttccaaaatatttccccattatccttcatctcctccattttcttcttcattcaggtccgttacggtcacctggacagtaa

SEQ ID NO: 2448 - protein, 224 aa, Alloiococcus otitidis
MTSNSVSKSAKSRLIKGLAAPLAPSKTIFKPDKSPEMVWDRNWVYFRLPSLNSSEVPKPWAAGRGKSSSPLSNKLSISASCWSDNLKPSGPKNLIPLSSTGLWEAEIIIPAAAFWDRVKNDTPGVVITPSRKTSAPADKRPETRAYSSIRQLILVSLPTKTCGWPSSTWRDKTIAPNRPNLKANSGVNSWLAMPLTPSVPKYFPIILHLLHFLLHSGPLRSPGQ

SEQ ID NO: 2449 - DNA, 996 bp, Alloiococcus otitidis
  CDS (1)..(993)
atgaaattttcctttgataatcccttagtgatgaagattttatccgttattgttgccattggaatgttcctctttgtatcgagtgaaaacaaccaaatggaccccgatgctcctgcgtctacccattccgtaacggaggtcctcactaatatgacggtgaccacggatgtcgataatgaagaatactatgtttccggggtgccagagtcagtttctattcgcttagacggccctcaaccaattatcgcccaaactgttattacccaaaattttaccattaaaacccctaacttaaaccggctaggacccggggaacacttggttgagttagaagtagagggtctgtcttctgaaattaattataatatcagccctagtgaagccagaatccaaattcaagagcgagaaaccaaagattttgatgtatctgtcgattttcaggaagaagactttatagcagaaggttatgaagtgaccaatattgaccaatcacatgattatgtcaccatttctggcgccaaaaacaccattgacgaaattgatgaagtcaaggccttggtccaaccagaatcaggcgatattaccagcgatgtgaccctaccaggtaatgtggttgttttaaataaggctggcgaacccctcaatgtcagtattgaaccgtctcaaatcgaagtttcgatccaggtagacagccaggaggttgaactgccgattgaattagtggagaccggtcaaatgtccagtgactatgaatatgagctggaacttgctgaggaccaggctgataccataaccgttaaaggtgattatgataaggtcagtgaacttgatgaattccaagtacccgttgacctatctggtgtaaccaagtcaaccaacagacaagtgccaattattttacccgacggcatctatgaagctgacttggaccaggttactgtccaggtgaccgtaacggacctgaatgaagaagaaaatggaggagatgaaggataa

SEQ ID NO: 2450 - protein, 331 aa, Alloiococcus otitidis
MKFSFDNPLVMKILSVIVAIGMFLFVSSENNQMDPDAPASTHSVTEVLTNMTVTTDVDNEEYYVSGVPESVSIRLDGPQPIIAQTVITQNFTIKTPNLNRLGPGEHLVELEVEGLSSEINYNISPSEARIQIQERETKDFDVSVDFQEEDFIAEGYEVTNIDQSHDYVTISGAKNTIDEIDEVKALVQPESGDITSDVTLPGNVVVLNKAGEPLNVSIEPSQIEVSIQVDSQEVELPIELVETGQMSSDYEYELELAEDQADTITVKGDYDKVSELDEFQVPVDLSGVTKSTNRQVPIILPDGIYEADLDQVTVQVTVTDLNEEENGGDEG

SEQ ID NO: 2451 - DNA, 1359 bp, Alloiococcus otitidis
  CDS (7)..(1356)
aggataatggggaaatattttggaacagatggtgtaagaggcatagccaaccaggaattgacgccagagttagcttttaagttaggacggttcggagctattgtcttgtcccgccatgttgaagaaggccagccacaagttttagtcggaagggataccagaatcagttgccgtatgctagaatatgctctcgtttctggccttttgtcagctggagcagaagttttgcgactaggagtgatcactacgcctggtgtgtcatttttgacccggtcccagaatgctgcagctggtattatgatctcggcttcccacaacccagtcgaagacaatgggatcaagttttttggtccggacggctttaaattatccgaccaacaagaagcggaaatcgaaagcttgttggatagcggagaagacgactttcctcggcctgctgcccaaggtttagggacttctgaagagtttaatgaaggcagtctaaaatatacccaattcctatcccaaaccatttccggcgacttgtctggcttaaaaattgtcttggatggggccaatggggctgctagtcccttgattaaccgactctttgctgatttagacacggaatttgacgtcattggggcttcacccgacggcttgaatattaacgatggctatggctctacccacccagaaaacctggcccaagaggttgttgaaaaggaagcccaagtaggattagcctttgatggcgatggcgaccggctcattgcggtggatgaaaaagggaatattgtcgacggcgataaaattctctttatctgtggtcgttacctagctgaccaaggccggctgaagcaaaatactattgtgaccactgttatgagtaacctgggcttttacaaggctgcagagaaatatgatatcgattcagtccaaactaaggtaggggaccgctttgtagttgaagaaatgagagacaaaggctacaaccttggaggtgaacagtccggccatattatcttcttagaccaccatacaactggagatggtctcttgacggctatccagcttcttgatgtgatgaaacaaactggcaagaaattatcagacctggctagtgatgtggaaaattacccccaaaaattagtcaatgtttcagtgaccaacaaggaagaagccctcaacaaccagaaaattcaagatgtgattgctgaagttgaagcagaattagccagtgaaggccgagttttagtccgaccaagtgggactgaacccttgatccgggttatggtagaaggcccgagtgatgaagcggtggaccactattgccagaaaatcgtggctgtcgtgaaagaagaagtcggcttagcctaa

SEQ ID NO: 2452 - protein, 450 aa, Alloiococcus otitidis
MGKYFGTDGVRGIANQELTPELAFKLGRFGAIVLSRHVEEGQPQVLVGRDTRISCRMLEYALVSGLLSAGAEVLRLGVITTPGVSFLTRSQNAAAGIMISASHNPVEDNGIKFFGPDGFKLSDQQEAEIESLLDSGEDDFPRPAAQGLGTSEEFNEGSLKYTQFLSQTISGDLSGLKIVLDGANGAASPLINRLFADLDTEFDVIGASPDGLNINDGYGSTHPENLAQEVVEKEAQVGLAFDGDGDRLIAVDEKGNIVDGDKILFICGRYLADQGRLKQNTIVTTVMSNLGFYKAAEKYDIDSVQTKVGDRFVVEEMRDKGYNLGGEQSGHIIFLDHHTTGDGLLTAIQLLDVMKQTGKKLSDLASDVENYPQKLVNVSVTNKEEALNNQKIQDVIAEVEAELASEGRVLVRPSGTEPLIRVMVEGPSDEAVDHYCQKIVAVVKEEVGLA

SEQ ID NO: 2453 - DNA, 747 bp, Alloiococcus otitidis
  CDS (13)..(744)
gaggaaagactcatgtttaagacgaaagatttgctgttcacgagctctgatattaaaagggaagccaaggcacagttagctggacgctggccctcaattatattcatgtttgtcgtcccaatgtttgtcatgccagtcctaaccctttggctacggatcttacttgaagagccttttgcctaccccatttgggggacttactggacctggttgcttgacttggtctttatcttcttaaacctgttaaactaccacctccaatatggaccagctcttagcttggttcgggtgattcgctggccacaagataggattgaacctttgtctgacttattctatttattccgggagggcaggtttggcccctaccttattctgggaatagtaaagagtatctttatcttcttgtggtccctcttgtttattatcccgggcatcattaaacaactggcctattcccaagctgaatatatcaaaaatgactaccgggctcgaggctggcacctgaccacgaccgaaactattacccttagccggcagatgatggatggccacaagatggatttgtttgccctttatcttagttttatcggttggtttattttggtcgccttaacctttggacttctgtcattttatgtcattccctacctgcaaatgtcattagcagttttttaccaaaatatatctaaagatttttttgctgaagtagacgaaaaaataaagcaagaagaattagacttttaa

SEQ ID NO: 2454 - protein, 244 aa, Alloiococcus otitidis
MFKTKDLLFTSSDIKREAKAQLAGRWPSIIFMFVVPMFVMPVLTLWLRILLEEPFAYPIWGTYWTWLLDLVFIFLNLLNYHLQYGPALSLVRVIRWPQDRIEPLSDLFYLFREGRFGPYLILGIVKSIFIFLWSLLFIIPGIIKQLAYSQAEYIKNDYRARGWHLTTTETITLSRQMMDGHKMDLFALYLSFIGWFILVALTFGLLSFYVIPYLQMSLAVFYQNISKDFFAEVDEKIKQEELDF

SEQ ID NO: 2455 - DNA, 714 bp, Alloiococcus otitidis
  CDS (94)..(711)
aaaggaacgctgataggattgccaatattttttgacccttatttttatttagttatcattgggatcgctatctctggggctgcctccgtttacatgcagtcgacctattccaaatttagtgatgtcaaggctagcaatggccaaaccgctgccgaagtctgccggcaaattctagattccaagggcctatccaatattcgcttagaaggcatccgaggggaattaaccgaccactacagtgctaatgagaaaactctccgtttgtctgaagcaaccaaaaattcagactcggttgcagcaattggggtcgcagcccatgaaacaggccacgccatccaagacaaggaaggctacttcccccttcgcttacgccacctcctcgtgcctgtaaccaactttggatcgaccttggcttggccggttatcctttttggtctcttgatcggccaagaaagtgggaattttttaatcatgctaggtattatgctcttctccttggctcttttcttccaattggtcaccctacccgttgaatttaatgcttctagacgggctatgaaggtgctagaagggtccgctcttctcaatgaagaagaactcagccaagctcgaaaagttctccgggcagcagctttgacctatgttgctgcaaccattaccaccttcttaaatatactccgggtcttcttactcacccaaaaccgtcgtcgttaa

SEQ ID NO: 2456 - protein, 206 aa, Alloiococcus otitidis
MQSTYSKFSDVKASNGQTAAEVCRQILDSKGLSNIRLEGIRGELTDHYSANEKTLRLSEATKNSDSVAAIGVAAHETGHAIQDKEGYFPLRLRHLLVPVTNFGSTLAWPVILFGLLIGQESGNFLIMLGIMLFSLALFFQLVTLPVEFNASRRAMKVLEGSALLNEEELSQARKVLRAAALTYVAATITTFLNILRVFLLTQNRRR

SEQ ID NO: 2457 - DNA, 714 bp, Alloiococcus otitidis; identical to SEQ ID NO: 2455
  CDS (19)..(711)

SEQ ID NO: 2458 - protein, 231 aa, Alloiococcus otitidis
MPIFFDPYFYLVIIGIAISGAASVYMQSTYSKFSDVKASNGQTAAEVCRQILDSKGLSNIRLEGIRGELTDHYSANEKTLRLSEATKNSDSVAAIGVAAHETGHAIQDKEGYFPLRLRHLLVPVTNFGSTLAWPVILFGLLIGQESGNFLIMLGIMLFSLALFFQLVTLPVEFNASRRAMKVLEGSALLNEEELSQARKVLRAAALTYVAATITTFLNILRVFLLTQNRRR

SEQ ID NO: 2459 - DNA, 279 bp, Alloiococcus otitidis
  CDS (13)..(276)
gagcctggccccttggctacagcaatccggtcgaggtctttagcctgccagccggtctcttctagcaagttagcgatacttggcataacttggatgctgtggttgcgtttaatattgatttttttgactgccaaaagcttgtcgtcttcagctagggccatggccatggccttgtttgatgtatcaacggccataactttcataatgacaccttcatcctttttattttggcttgacttcttcattcatgctgggccaggtcgtcggcgaaagccttaa

SEQ ID NO: 2460 - protein, 88 aa, Alloiococcus otitidis
MATAIRSRSLACQPVSSSKLAILGITWMLWLRLILIFLTAKSLSSSARAMAMALFDVSTAITFIMTPSSFLFWLDFFIHAGPGRRRKP

SEQ ID NO: 2461 - DNA, 1503 bp, Alloiococcus otitidis
  CDS (13)..(1500)
ggagatagtttgatgaccatttcgcaaaccattattgattttacccacaagtgcctgcagcagggggaccttttaggacttgacctgacctatgtccaaaaccaattgctgagaatctttcatttgaaagaattggaccaagtcgatcccagtgccaacttggcccagctagaccacctagacctcttggaccaactcctagaccatgcagtggacttagacttgattgaagacaatagttcaaacagggatgtcctgggagctgagattatggacttagtgacccccttgccttctcaagtcaatgccaagttttgggacttacaccggctaagccccaagctcgctaccgattatttttaccaaacaagcttgcaaaacaactacattaaaagccgggagatcgcccaaaatatctactttagccaccagactgactttggggatttggagttgaccattaatctgtccaagccagaaaagaccagcaaggagattgaagaggctaaaaacaatcccagtgactacccggtcaacctcttaagttaccaaaatgaaggctaccggggtcatgtgggccacccgggccggtctaaccatcgtttgatccggttaactttagataatggtgagcaatggggcttccagtactcgccttatgcttactacaatgaacattctatcttcttatccatggcccaccgccctatgaaagtgggcaagcaaacagtggtcaatttactcaatatcttagaagaatttccccactattttgtggggtctaatgccggccttcccattgtaggcgggtctatcttggcccatgaccactaccaggctggccgccaccaatttgccttagacactgccccttctatctacgactttacccttaagggggtccaggccagtattgtaaactggcccatgtctgtgatccgcctcaaagacccggaccgaaacaaattaacccaggcggcccaagtcgtctttcaggagtgggagagttacagcaacgaagacttatccatccaagcttttacaggggagaccccccataatgctattacccctttgacgcgtaaagatgggactgactttgtggttgacttggtcctccgcaacaaccggacagataagacttaccctgacggtattttccacccccacccagaggtccagcatatcaaacaggaaaacatcggcttaattgaggtcctaggtctagccgtcctccctccacgtttgaaaggggagttacaggaagtgcgggactacttactgggtcaaactggtcaagtagccaccatccaccaggcttgggctgagtccctaaaagaaaaatacgggatcctcagtccagaagaggtagacggggttgtacaggctgaagtaggggagaaattcctccaagtcttaaaagatgctggtgtctttaagttggaccaggcaggacaggctgcctttaaggctttcgccgacgacctggcccagcatgaatga

SEQ ID NO: 2462 - protein, 496 aa, Alloiococcus otitidis
MTISQTIIDFTHKCLQQGDLLGLDLTYVQNQLLRIFHLKELDQVDPSANLAQLDHLDLLDQLLDHAVDLDLIEDNSSNRDVLGAEIMDLVTPLPSQVNAKFWDLHRLSPKLATDYFYQTSLQNNYIKSREIAQNIYFSHQTDFGDLELTINLSKPEKTSKEIEEAKNNPSDYPVNLLSYQNEGYRGHVGHPGRSNHRLIRLTLDNGEQWGFQYSPYAYYNEHSIFLSMAHRPMKVGKQTVVNLLNILEEFPHYFVGSNAGLPIVGGSILAHDHYQAGRHQFALDTAPSIYDFTLKGVQASIVNWPMSVIRLKDPDRNKLTQAAQVVFQEWESYSNEDLSIQAFTGETPHNAITPLTRKDGTDFVVDLVLRNNRTDKTYPDGIFHPHPEVQHIKQENIGLIEVLGLAVLPPRLKGELQEVRDYLLGQTGQVATIHQAWAESLKEKYGILSPEEVDGVVQAEVGEKFLQVLKDAGVFKLDQAGQAAFKAFADDLAQHE

SEQ ID NO: 2463 - DNA, 1503 bp, Alloiococcus otitidis; identical to SEQ ID NO: 2461
  CDS (10)..(1500)

SEQ ID NO: 2464 - protein, 497 aa, Alloiococcus otitidis
MMTISQTIIDFTHKCLQQGDLLGLDLTYVQNQLLRIFHLKELDQVDPSANLAQLDHLDLLDQLLDHAVDLDLIEDNSSNRDVLGAEIMDLVTPLPSQVNAKFWDLHRLSPKLATDYFYQTSLQNNYIKSREIAQNIYFSHQTDFGDLELTINLSKPEKTSKEIEEAKNNPSDYPVNLLSYQNEGYRGHVGHPGRSNHRLIRLTLDNGEQWGFQYSPYAYYNEHSIFLSMAHRPMKVGKQTVVNLLNILEEFPHYFVGSNAGLPIVGGSILAHDHYQAGRHQFALDTAPSIYDFTLKGVQASIVNWPMSVIRLKDPDRNKLTQAAQVVFQEWESYSNEDLSIQAFTGETPHNAITPLTRKDGTDFVVDLVLRNNRTDKTYPDGIFHPHPEVQHIKQENIGLIEVLGLAVLPPRLKGELQEVRDYLLGQTGQVATIHQAWAESLKEKYGILSPEEVDGVVQAEVGEKFLQVLKDAGVFKLDQAGQAAFKAFADDLAQHE

SEQ ID NO: 2465 - DNA, 774 bp, Alloiococcus otitidis
  CDS (1)..(771)
atgaagaagtcaagccaaaataaaaaggatgaaggtgtcattatgaaagttatggccgttgatacatcaaacaaggccatggccatggccctagctgaagacgacaagcttttggcagtcaaaaaaatcaatattaaacgcaaccacagcatccaagttatgccaagtatcgctaacttgctagaagagaccggctggcaggctaaagacctcgaccggattgctgtagccaaggggccaggctcttataccggcctccggattgctggcaccctggccaagaccctggcctggacactgggaattgaccttgtggcctactctagcttagaggccttggccttgaacttggctctgattcggcaggtttatatctgccccctctttgatgctagacgggaaaatatctatactggcctttaccgttttgacccggcaggccagctggaaaatgtcatcgaagaccagcatctagctagtcaggactgggcgagaaggctttcggacttggatgagccagtttactttgttggagaagatgtgttgacttttgctcccttgtttaaagaaaaattagggcctcattttatctaccaaagaggggtcagtcagctcccaaatgttgaagccatggccttacaggctcagagccagcctcttcaagatgtccaccactttataccggaatacttaaaattggctgaagcagaagaaaactggctgaaagataatcctgatgcagacgggagcacttacgttgaaaaattggattga

SEQ ID NO: 2466 - protein, 257 aa, Alloiococcus otitidis
MKKSSQNKKDEGVIMKVMAVDTSNKAMAMALAEDDKLLAVKKINIKRNHSIQVMPSIANLLEETGWQAKDLDRIAVAKGPGSYTGLRIAGTLAKTLAWTLGIDLVAYSSLEALALNLALIRQVYICPLFDARRENIYTGLYRFDPAGQLENVIEDQHLASQDWARRLSDLDEPVYFVGEDVLTFAPLFKEKLGPHFIYQRGVSQLPNVEAMALQAQSQPLQDVHHFIPEYLKLAEAEENWLKDNPDADGSTYVEKLD

SEQ ID NO: 2467 - DNA, 606 bp, Alloiococcus otitidis
  CDS (163)..(603)
aagataatcctgatgcagacgggagcacttacgttgaaaaattggattgaccagctccagtcttggtggaccaatatagtgggtcaggtgtctctaagagattcaagtctccccctcatacaggaaagttacacgagccaggggaggagctaccaggtaaaagtgggccaaaaagctgacgccaagtccctggtcaatttgcaagaaactgcttacagctctaatgagatctggcccaagtcccttctggaaagggaaatgtccaccaagtccaattccctttacttactcctactctaccaaaactacccggttgcctttattggggcctggattaagggagacaactgccacgtctccaacttagtcgtcagacccggctatcaaagacaaggcctgggccagtttttgctccaccaggtagagcaaattgccttaaaccaaaagtgtcgctactatagtttagaagttagaaagtccaaccacaaggcccaaaaactctaccagaaaatgggctttgaaactgtcggcgtcaaaaaagaatactactccaataaccgagaagatggcttggccatggtcaagcaattaatattaaaagactag

SEQ ID NO: 2468 - protein, 147 aa, Alloiococcus otitidis
MGQKADAKSLVNLQETAYSSNEIWPKSLLEREMSTKSNSLYLLLLYQNYPVAFIGAWIKGDNCHVSNLVVRPGYQRQGLGQFLLHQVEQIALNQKCRYYSLEVRKSNHKAQKLYQKMGFETVGVKKEYYSNNREDGLAMVKQLILKD

SEQ ID NO: 2469 - DNA, 606 bp, Alloiococcus otitidis; identical to SEQ ID NO: 2467
  CDS (13)..(603)

SEQ ID NO: 2470 - protein, 197 aa, Alloiococcus otitidis
MQTGALTLKNWIDQLQSWWTNIVGQVSLRDSSLPLIQESYTSQGRSYQVKVGQKADAKSLVNLQETAYSSNEIWPKSLLEREMSTKSNSLYLLLLYQNYPVAFIGAWIKGDNCHVSNLVVRPGYQRQGLGQFLLHQVEQIALNQKCRYYSLEVRKSNHKAQKLYQKMGFETVGVKKEYYSNNREDGLAMVKQLILKD

SEQ ID NO: 2471 - DNA, 609 bp, Alloiococcus otitidis
  CDS (64)..(606)
ccgagaagatggcttggccatggtcaagcaattaatattaaaagactaggaaggaagaagacggtggccgaccagaccgaaaagaaagagactcagctaggcccaggcctagcatccaagactactcctttcatccgccttttaaaggctcaggaagacttgtcccaagaactccaccaaatcagcctatctgcctttgcccagcaaccaccttggcaggaggcccagcttaacagtatcctccagtcagaccatgtccttacccttctggttgaagaaaagaaggaggtcttagcctttatgatccttggcttggctggagaccaggctgagatctatcaaattgccgtggccaaaccccaccagcgccggggcctggccagcctgcttatggaagactgcttgcgtcatctttgggctaatggggtttcaaagctttttttggaagtccgggcttccaaccgaccagctcagcttttctataaaagacaggggtttaccctgcaaggttaccgtaaaaattactaccataatcctaaagaagatgccttggtcttagccttaaacttaaatggaaagagagatggaaatgttcattcttgcaattga

SEQ ID NO: 2472 - protein, 181 aa, Alloiococcus otitidis
MADQTEKKETQLGPGLASKTTPFIRLLKAQEDLSQELHQISLSAFAQQPPWQEAQLNSILQSDHVLTLLVEEKKEVLAFMILGLAGDQAEIYQIAVAKPHQRRGLASLLMEDCLRHLWANGVSKLFLEVRASNRPAQLFYKRQGFTLQGYRKNYYHNPKEDALVLALNLNGKRDGNVHSCN

SEQ ID NO: 2473 - DNA, 1020 bp, Alloiococcus otitidis
  CDS (13)..(1017)
atggaaagagagatggaaatgttcattcttgcaattgaaagctcctgcgatgaaaccagtgcggctgttatccaagatggccggattgttaaatccaatatcgtggcttctcaaattaaaagtcacgagcgctttggtggggttgtaccggaaattgcttcccgccaccatgtggaatttatcaccctgattattgaggaagccatgaaggaggcagaagttgactttaacgacctgtcagccgtagccgtcacccaggggccaggtttggttggcgctcttttgatcggcattagcgctgcaaaagccatagccttagcccatgacctccctctaattcctgttaaccatctagccggccatatttatgctagtaacctggttgagtccatgaccttccccctcctcgccctagttgttagtgggggccatactgagttggtttatatggcagaagatggtcaatatgaggtagtcggtgaaacacgggatgatgcagcaggggaggcctatgacaaggttggccgggtcctagacttgccttacccggccggcaaggtcattgaccagatggctgaccaaggccaagacaccttccacttcccccgggctatgctccaggaagataattatgactttagtttttctggactcaaatcggcctttatcaacacagtccacaatgccaagcaaaaggggcaatccttagatgccaatgacctggcagccagtttccaggcagcggtcgtagaaacattggtagagaaaactatccgggcagctaaagactaccaagtcaggcaagtgattttggcaggtggtgtggcagccaatagtggccttcgaacccatttaaaaaaacgactagaagctgaaatgccgcaactggacctccttattcccccaatctccctttgcggggacaatgcagccatgatcggagcagctgggaccatagcttaccggaaaggagactttggtcagctcgacctcaatgccaagcctggcctgatgctgtag

SEQ ID NO: 2474 - protein, 335 aa, Alloiococcus otitidis
MEMFILAIESSCDETSAAVIQDGRIVKSNIVASQIKSHERFGGVVPEIASRHHVEFITLIIEEAMKEAEVDFNDLSAVAVTQGPGLVGALLIGISAAKAIALAHDLPLIPVNHLAGHIYASNLVESMTFPLLALVVSGGHTELVYMAEDGQYEVVGETRDDAAGEAYDKVGRVLDLPYPAGKVIDQMADQGQDTFHFPRAMLQEDNYDFSFSGLKSAFINTVHNAKQKGQSLDANDLAASFQAAVVETLVEKTIRAAKDYQVRQVILAGGVAANSGLRTHLKKRLEAEMPQLDLLIPPISLCGDNAAMIGAAGTIAYRKGDFGQLDLNAKPGLML

SEQ ID NO: 2475 - DNA, 1020 bp, Alloiococcus otitidis; identical to SEQ ID NO: 2473
  CDS (1)..(1017)

SEQ ID NO: 2476 - protein, 339 aa, Alloiococcus otitidis
MEREMEMFILAIESSCDETSAAVIQDGRIVKSNIVASQIKSHERFGGVVPEIASRHHVEFITLIIEEAMKEAEVDFNDLSAVAVTQGPGLVGALLIGISAAKAIALAHDLPLIPVNHLAGHIYASNLVESMTFPLLALVVSGGHTELVYMAEDGQYEVVGETRDDAAGEAYDKVGRVLDLPYPAGKVIDQMADQGQDTFHFPRAMLQEDNYDFSFSGLKSAFINTVHNAKQKGQSLDANDLAASFQAAVVETLVEKTIRAAKDYQVRQVILAGGVAANSGLRTHLKKRLEAEMPQLDLLIPPISLCGDNAAMIGAAGTIAYRKGDFGQLDLNAKPGLML

SEQ ID NO: 2477 - DNA, 477 bp, Alloiococcus otitidis
  CDS (94)..(474)
aagacaattgtcagagaattttacgaccactttaagaatgaaggggtcaccaaggtttttaccatagaagcatccgggattgctcccgctattatgacagccattgaatttgacgtccccatgctctttgccaaaaaaaccgaaccgtcaaccttaaaaaaccaagcccattacgaaacacaggtccacagttttaccaaggacaaaaccagccgagtcattgtatctaaggaatacttgcaagctgaggacaaggttttaatcatcgacgatttcctagcccggggacaagcctccttagggctggttgacttggttcggcaagctggagctagtgtagctggagttgggatctgtgtcgaaaagtccttccaagatggccggcaaaaccttgagtctgaaggtattgatgtctactccatctgccggattaactccttaaaagacaaccaagtccacttcgccccaggccattaa

SEQ ID NO: 2478 - protein, 127 aa, Alloiococcus otitidis
MTAIEFDVPMLFAKKTEPSTLKNQAHYETQVHSFTKDKTSRVIVSKEYLQAEDKVLIIDDFLARGQASLGLVDLVRQAGASVAGVGICVEKSFQDGRQNLESEGIDVYSICRINSLKDNQVHFAPGH

SEQ ID NO: 2479 - DNA, 141 bp, Alloiococcus otitidis
  CDS (1)..(138)
atgggcttgttaaaagaccggattatccaagaagggattgtcttagatgaaactgtattaaagatcgattcctttttaaaccaccaaattgaccccaaagtcatgaaagacaattgtcagagaattttacgaccactttaa

SEQ ID NO: 2480 - protein, 46 aa, Alloiococcus otitidis
MGLLKDRIIQEGIVLDETVLKIDSFLNHQIDPKVMKDNCQRILRPL

SEQ ID NO: 2481 - DNA, 1986 bp, Alloiococcus otitidis
  CDS (28)..(1983)
actaaggtgactatttttaaaggaagaatgtatatgatactactccaagcacaaaaagtggctagggattttgcaggtgaaaccctctttgaccaggtcaacttacaggtccaagatggggctcggattggcctagtcggcaggaatggggcgggcaagtctaccctcctccacatcctggctggccatgaagatcctgacgctggccaagtttcttggcaaaaggacttgtccattggctatttagaccagcatactggcctagactctgaccggactatcctagaagaaatggagtctgtcttctcttggttgattgacctggaaacagacctccaccaattagaagaaaaaatcagccaagttcaagagactagctcagactaccaagacctgatggcccagtatgataagatgcaaaccagatttttaaagcaaaatggctacggttatgaaagtgaaatccggacagtcttacatggcttccaattttacgaaacagactacgacaccccgattaatcacctttctggaggtcaaaagacccggttagccctggctaagctccttttggaaaacaaggacttgcttattttagacgagcccaccaaccacctggatatagaaaccttagcctggttggaaggctatctcaagaactaccggggggctcttttaatcgtctcccacgaccggtactttttagaccgggtgatcaatgagacctacgaagtggctttgggccaggtcacccatttccctggtaactattccaattatttagacttaaaatcggctcagatcaagcagcaggccaaggaatatgacaagcagcagaaaaaaatatcggaaatggaagactttatccaaaaaaatattgtccgagcctccaccaccaagcgggcccaggctagacgtaagcagttagaaaagatggaaacagtccaaaaacccaaaaaggatgaccagtctgcctacttctcctttgaaactgaccgaacttccggtgacattgtcctccagactaaggatctggccattgggtatggcgatcaagtcttagccgaggatattaacttagacatccgcaagggagatgccatcgccttggtcggacctaacggcattggcaagtctacccttatcaagaacttagccggtgttaatccagccttggcgggtgacattcggtatgggaccaaggtagacctaggctactacgaccaggaacaggccaatctaactggcaataagtccattttagatgaggtctgggacgcacagccagaccttgacgaagtggttatccgaaccctactggccagcttcctctttacaggcgaagcggtcgacaaaaccattcattccctcagtggtggggaaaaagcccgggtcgccctggccaaattatcattagaaaaaaacaacttcctcctcttagacgaacctaccaaccacttagacatcgattccaaggaagtattagaaaatgccttaatcgactatcagggaaccttgatctttgtctcccacgatcgttactttatcaaccgcttggccagccaggtcatcgaaatccacccaggtggtattgaccgatacctaggcgactacgactattatgtccagaagaaagaagaactccaagccattgaagcagcccagactaaggctgaacaagataaacaagcccctgaacaagggcaagagcaaagtcaagacagcctggaccgcaaagacttgaaagaaagacaaaaagaaagccgccgattaaatcgccgggcggaaaaaattgaagccagactggaagaaatcgaccaggatctagcagacctggcccaagacttggaaaagcctgatctctaccaagcccctgacaaattagctgaattaagccagacccaccaagacctagaccaagaacaggttcgcttaatggaagaatgggaagaaatccaggaagacttgctcgatttggatgactaa

SEQ ID NO: 2482 - protein, 652 aa, Alloiococcus otitidis
MYMILLQAQKVARDFAGETLFDQVNLQVQDGARIGLVGRNGAGKSTLLHILAGHEDPDAGQVSWQKDLSIGYLDQHTGLDSDRTILEEMESVFSWLIDLETDLHQLEEKISQVQETSSDYQDLMAQYDKMQTRFLKQNGYGYESEIRTVLHGFQFYETDYDTPINHLSGGQKTRLALAKLLLENKDLLILDEPTNHLDIETLAWLEGYLKNYRGALLIVSHDRYFLDRVINETYEVALGQVTHFPGNYSNYLDLKSAQIKQQAKEYDKQQKKISEMEDFIQKNIVRASTTKRAQARRKQLEKMETVQKPKKDDQSAYFSFETDRTSGDIVLQTKDLAIGYGDQVLAEDINLDIRKGDAIALVGPNGIGKSTLIKNLAGVNPALAGDIRYGTKVDLGYYDQEQANLTGNKSILDEVWDAQPDLDEVVIRTLLASFLFTGEAVDKTIHSLSGGEKARVALAKLSLEKNNFLLLDEPTNHLDIDSKEVLENALIDYQGTLIFVSHDRYFINRLASQVIEIHPGGIDRYLGDYDYYVQKKEELQAIEAAQTKAEQDKQAPEQGQEQSQDSLDRKDLKERQKESRRLNRRAEKIEARLEEIDQDLADLAQDLEKPDLYQAPDKLAELSQTHQDLDQEQVRLMEEWEEIQEDLLDLDD

SEQ ID NO: 2483 - DNA, 1986 bp, Alloiococcus otitidis; identical to SEQ ID NO: 2481
  CDS (7)..(1983)

SEQ ID NO: 2484 - protein, 659 aa, Alloiococcus otitidis
MTIFKGRMYMILLQAQKVARDFAGETLFDQVNLQVQDGARIGLVGRNGAGKSTLLHILAGHEDPDAGQVSWQKDLSIGYLDQHTGLDSDRTILEEMESVFSWLIDLETDLHQLEEKISQVQETSSDYQDLMAQYDKMQTRFLKQNGYGYESEIRTVLHGFQFYETDYDTPINHLSGGQKTRLALAKLLLENKDLLILDEPTNHLDIETLAWLEGYLKNYRGALLIVSHDRYFLDRVINETYEVALGQVTHFPGNYSNYLDLKSAQIKQQAKEYDKQQKKISEMEDFIQKNIVRASTTKRAQARRKQLEKMETVQKPKKDDQSAYFSFETDRTSGDIVLQTKDLAIGYGDQVLAEDINLDIRKGDAIALVGPNGIGKSTLIKNLAGVNPALAGDIRYGTKVDLGYYDQEQANLTGNKSILDEVWDAQPDLDEVVIRTLLASFLFTGEAVDKTIHSLSGGEKARVALAKLSLEKNNFLLLDEPTNHLDIDSKEVLENALIDYQGTLIFVSHDRYFINRLASQVIEIHPGGIDRYLGDYDYYVQKKEELQAIEAAQTKAEQDKQAPEQGQEQSQDSLDRKDLKERQKESRRLNRRAEKIEARLEEIDQDLADLAQDLEKPDLYQAPDKLAELSQTHQDLDQEQVRLMEEWEEIQEDLLDLDD

SEQ ID NO: 2485 - DNA, 687 bp, Alloiococcus otitidis
  CDS (22)..(684)
ttttgcaaaggggaccatattatggtaaaacaaagacagattccaaaggcgacagcaaggcggttgccactttactaccgttactttacctatctttatgaaacaggcattaagcggatttcttcagcccaattgagcgagtctatgaaggttgatagtgcaactattcgaagagacttctcttactttggggccttgggtaagcggggttacggctacgatgttgaaaacttgatgaacttctttaaagaacaattgagtcaagaggagttaaccaatattgccttggttggagtggggaacctgggccaggccttgcttaactataacttccggaaagacaatagcatgcggatatcagccggctttgatgtcaatcctggcttgatcgataccatcttagaaggcgtcccaatctatgatgtcaaggatctggtggcccaagtctctgaccaaaaaatcaatgtggccatcctagctgtccccagcgatcatgcccaagacatgactgataagttagtggaagctggagtgaaaggcatcctcaactttacccctctaagggtaacagtcccacctggagtccgagtccataatgttgacttggccaacgaactacaggccttgatctactttatcagccattataccgacactgaccaagaagccagcatggatgaagaataa

SEQ ID NO: 2486 - protein, 221 aa, Alloiococcus otitidis
MVKQRQIPKATARRLPLYYRYFTYLYETGIKRISSAQLSESMKVDSATIRRDFSYFGALGKRGYGYDVENLMNFFKEQLSQEELTNIALVGVGNLGQALLNYNFRKDNSMRISAGFDVNPGLIDTILEGVPIYDVKDLVAQVSDQKINVAILAVPSDHAQDMTDKLVEAGVKGILNFTPLRVTVPPGVRVHNVDLANELQALIYFISHYTDTDQEASMDEE

SEQ ID NO: 2487 - DNA, 705 bp, Alloiococcus otitidis
  CDS (94)..(702)
agaatagaaatgatagctcttataaagaaagtaggtctaactttgcgtcctaaaaaacaaaagccttcccagattggcccggctgtcagcattatgctgacctttattgccgtccaagtcttatcgattgtagccgtcttccttttccaaagccaaccacccagctactttatcaatgccaatgtggtcatcaacctggcaggggccttctttgccctttggattaattatcatttcaacctggtttatccctttgaaagaggacaaacaaaaggcaaggaaatcctcacttggggcctaaccggaacagctttagcctacctgtctcaagtggccctaaccatgctagagatcaccctctttggccaacccaccgtctcggccaataccacatccattatggcaaccatcctggccaaccccctcttcgtcctccttcccatcatctccgcccccatcttggaggaattggtctttagaaaggcgattaacggcctcttagtagacaagattggctggattggggctgccgtcatctcttccttggtcttcgcctttatccactttgacgggatgattttaacttattctgtcatgggccttatctttagctatgtctactacaaaacccaaaacatttggggtcccatcatcgcccatatggggctgaacattttagctaccatcttgaacttgctggtctaa

SEQ ID NO: 2488 - protein, 203 aa, Alloiococcus otitidis
MLTFIAVQVLSIVAVFLFQSQPPSYFINANVVINLAGAFFALWINYHFNLVYPFERGQTKGKEILTWGLTGTALAYLSQVALTMLEITLFGQPTVSANTTSIMATILANPLFVLLPIISAPILEELVFRKAINGLLVDKIGWIGAAVISSLVFAFIHFDGMILTYSVMGLIFSYVYYKTQNIWGPIIAHMGLNILATILNLLV

SEQ ID NO: 2489 - DNA, 705 bp, Alloiococcus otitidis; identical to SEQ ID NO: 2487
  CDS (43)..(702)

SEQ ID NO: 2490 - protein, 220 aa, Alloiococcus otitidis
MRPKKQKPSQIGPAVSIMLTFIAVQVLSIVAVFLFQSQPPSYFINANVVINLAGAFFALWINYHFNLVYPFERGQTKGKEILTWGLTGTALAYLSQVALTMLEITLFGQPTVSANTTSIMATILANPLFVLLPIISAPILEELVFRKAINGLLVDKIGWIGAAVISSLVFAFIHFDGMILTYSVMGLIFSYVYYKTQNIWGPIIAHMGLNILATILNLLV

SEQ ID NO: 2491 - DNA, 705 bp, Alloiococcus otitidis; identical to SEQ ID NO: 2487
  CDS (10)..(702)

SEQ ID NO: 2492 - protein, 231 aa, Alloiococcus otitidis
MIALIKKVGLTLRPKKQKPSQIGPAVSIMLTFIAVQVLSIVAVFLFQSQPPSYFINANVVINLAGAFFALWINYHFNLVYPFERGQTKGKEILTWGLTGTALAYLSQVALTMLEITLFGQPTVSANTTSIMATILANPLFVLLPIISAPILEELVFRKAINGLLVDKIGWIGAAVISSLVFAFIHFDGMILTYSVMGLIFSYVYYKTQNIWGPIIAHMGLNILATILNLLV

SEQ ID NO: 2493 - DNA, 486 bp, Alloiococcus otitidis
  CDS (22)..(483)
tctaaaataacgttacgacctttggggcccagggttactttgactgtattcgctaatttgtcaacaccatctaaaatcgcattgcgtgcatcttcagaatatttaatttcttttgccataatttatatcacctcaaaaaaagatttacctgctagtctcacttactcaacaacagcgataatatctgtatcttttaccactaggtattcattgccatcgtatttcacttcggatccagcgtgtttttcaaagataacttggtcgccttcagctacttcaacttcagaccggctgccatcgggtaataagacgcccttgcctaccgcaacaacgcgtccagtctggggtgagtctttggctgattctggcaatacaaaaccgctcgcagttgtttcctctttttcagcaacttctaaaacgacacggttacttaaaggtttaagcattcaattcgcctccaaaaatcttcctaatttgatgacttag

SEQ ID NO: 2494 - protein, 154 aa, Alloiococcus otitidis
MGPRVTLTVFANLSTPSKIALRASSEYLISFAIIYITSKKDLPASLTYSTTAIISVSFTTRYSLPSYFTSDPACFSKITWSPSATSTSDRLPSGNKTPLPTATTRPVWGESLADSGNTKPLAVVSSFSATSKTTRLLKGLSIQFASKNLPNLMT

SEQ ID NO: 2495 - DNA, 285 bp, Alloiococcus otitidis
  CDS (1)..(282)
atgcttaaacctttaagtaaccgtgtcgttttagaagttgctgaaaaagaggaaacaactgcgagcggttttgtattgccagaatcagccaaagactcaccccagactggacgcgttgttgcggtaggcaagggcgtcttattacccgatggcagccggtctgaagttgaagtagctgaaggcgaccaagttatctttgaaaaacacgctggatccgaagtgaaatacgatggcaatgaatacctagtggtaaaagatacagatattatcgctgttgttgagtaa

SEQ ID NO: 2496 - protein, 94 aa, Alloiococcus otitidis
MLKPLSNRVVLEVAEKEETTASGFVLPESAKDSPQTGRVVAVGKGVLLPDGSRSEVEVAEGDQVIFEKHAGSEVKYDGNEYLVVKDTDIIAVVE

SEQ ID NO: 2497 - DNA, 564 bp, Alloiococcus otitidis
  CDS (184)..(561)
gctgttcccccaccagctacgatgccttcagctacagctgctcgggaagcgttcaaggcatcttcaattctgagtttacgctctttcatttcagtttcagtaggggcaccaactttaataacagccacaccgccagctagtttagcaattctttcttgtaatttttcacggtcaaagtctgaattgctgtcttctgcctgtttacggagcatggctacgcggtcttcaacttggctgctttcgccagcaccttctacaatggtggtgtcatccttggtcacaatagccttgctggcaacacccaggtcatcgattgtcgcatcagacaagttcaagcccaagtcttcggtaatcacttggccaccagtcaagatggcaatatcttctagcatgcctttacgacggtcaccaaagccaggtgctttcaccgcagtaacgtccaaggtccctctaattttgttcaaaaccagggttggtaaagcttccccgtcaatatcgtcggcaataatcaagagaggccggttttgttgcataatgttttccaataatgggaggatgtcttga

SEQ ID NO: 2498 - protein, 126 aa, Alloiococcus otitidis
MLSSACLRSMATRSSTWLLSPAPSTMVVSSLVTIALLATPRSSIVASDKFKPKSSVITWPPVKMAISSSMPLRRSPKPGAFTAVTSKVPLILFKTRVGKASPSISSAIIKRGRFCCIMFSNNGRMS

SEQ ID NO: 2499 - DNA, 564 bp, Alloiococcus otitidis; identical to SEQ ID NO: 2497
  CDS (22)..(561)

SEQ ID NO: 2500 - protein, 180 aa, Alloiococcus otitidis
MPSATAAREAFKASSILSLRSFISVSVGAPTLITATPPASLAILSCNFSRSKSELLSSACLRSMATRSSTWLLSPAPSTMVVSSLVTIALLATPRSSIVASDKFKPKSSVITWPPVKMAISSSMPLRRSPKPGAFTAVTSKVPLILFKTRVGKASPSISSAIIKRGRFCCIMFSNNGRMS

SEQ ID NO: 2501 - DNA, 333 bp, Alloiococcus otitidis
  CDS (34)..(330)
ttagaactgagttcagcttggctctttttgcttgtgtcatttttacgctcgtcttacatcatgccacccatgccagggttcatgcctccgccttggttatcatcatcgcctgacggaatttcagcgactgctgcttcagaggtgaggaggagggctgcgatggaagctgcattttggagggcagaccgggttacgcgagttgggtcgataatgccttcttcaaccatgtcgaccatttcaccacttgccgcattgaagccaacaccttcttcgacagctttcaagcgttcaacaatcacactgccatcaataccagcattctctgcgatttga

SEQ ID NO: 2502 - protein, 99 aa, Alloiococcus otitidis
MSFLRSSYIMPPMPGFMPPPWLSSSPDGISATAASEVRRRAAMEAAFWRADRVTRVGSIMPSSTMSTISPLAALKPTPSSTAFKRSTITLPSIPAFSAI

SEQ ID NO: 2503 - DNA, 333 bp, Alloiococcus otitidis; identical to SEQ ID NO: 2501
  CDS (28)..(330)

SEQ ID NO: 2504 - protein, 101 aa, Alloiococcus otitidis
MLVSFLRSSYIMPPMPGFMPPPWLSSSPDGISATAASEVRRRAAMEAAFWRADRVTRVGSIMPSSTMSTISPLAALKPTPSSTAFKRSTITLPSIPAFSAI

SEQ ID NO: 2505 - DNA, 1635 bp, Alloiococcus otitidis
  CDS (4)..(1632)
attatggcaaaagaaattaaatattctgaagatgcacgcaatgcgattttagatggtgttgacaaattagcgaatacagtcaaagtaaccctgggccccaaaggtcgtaacgttattttagatcaatcatacggtgcaccaaccattaccaacgacggggtaaccattgccaaagaaattgaattagaagacaagtttgaaaacatgggtgcccaattagtcgtagaagtcgctagcaaaaccaatgacattgctggggacgggactacaactgcaaccgtcttagcccaagccattgtcaacgaaggcttgaaaaacgtgactgcaggtgccaacccagttggtatccgccgcgggattgaagaagcaaccaaaaaagctgtccaagccttgaagtctatttcaactgatgtctctgactctgaatccattgcccaaattgcttctatttcttctggtgacaaggaagttggtcagttgattgctcaagcaatggaaaaagtcggcagtgatggggtcattaccattgaagaatcacgtgggattgaaaccgaactggatgttgtcgaagggatgcagtttgaacgtggttacctctcccaatacatggtaaccgacaatgaaaaaatggaagccaacttggacaacccttacattttaattaccgacaagaaaatttctaatgttcaagacatcctcccattattggaaaacattatgcaacaaaaccggcctctcttgattattgccgacgatattgacggggaagctttaccaaccctggttttgaacaaaattagagggaccttggacgttactgcggtgaaagcacctggctttggtgaccgtcgtaaaggcatgctagaagatattgccatcttgactggtggccaagtgattaccgaagacttgggcttgaacttgtctgatgcgacaatcgatgacctgggtgttgccagcaaggctattgtgaccaaggatgacaccaccattgtagaaggtgctggcgaaagcagccaagttgaagaccgcgtagccatgctccgtaaacaggcagaagacagcaattcagactttgaccgtgaaaaattacaagaaagaattgctaaactagctggcggtgtggctgttattaaagttggtgcccctactgaaactgaaatgaaagagcgtaaactcagaattgaagatgccttgaacgcttcccgagcagctgtagctgaaggcatcgtagctggtgggggaacagcttatatcaacatcctcaaagaagtcaaaaaacttgaagaagagtctgatggcgacctagctaccggtgttagtatcgtcgtccgtgcccttgaagctcctgtccgtcaaatcgcagagaatgctggtattgatggcagtgtgattgttgaacgcttgaaagctgtcgaagaaggtgttggcttcaatgcggcaagtggtgaaatggtcgacatggttgaagaaggcattatcgacccaactcgcgtaacccggtctgccctccaaaatgcagcttccatcgcagccctcctcctcacctctgaagcagcagtcgctgaaattccgtcaggcgatgatgataaccaaggcggaggcatgaaccctggcatgggtggcatgatgtaa

SEQ ID NO: 2506 - protein, 543 aa, Alloiococcus otitidis
MAKEIKYSEDARNAILDGVDKLANTVKVTLGPKGRNVILDQSYGAPTITNDGVTIAKEIELEDKFENMGAQLVVEVASKTNDIAGDGTTTATVLAQAIVNEGLKNVTAGANPVGIRRGIEEATKKAVQALKSISTDVSDSESIAQIASISSGDKEVGQLIAQAMEKVGSDGVITIEESRGIETELDVVEGMQFERGYLSQYMVTDNEKMEANLDNPYILITDKKISNVQDILPLLENIMQQNRPLLIIADDIDGEALPTLVLNKIRGTLDVTAVKAPGFGDRRKGMLEDIAILTGGQVITEDLGLNLSDATIDDLGVASKAIVTKDDTTIVEGAGESSQVEDRVAMLRKQAEDSNSDFDREKLQERIAKLAGGVAVIKVGAPTETEMKERKLRIEDALNASRAAVAEGIVAGGGTAYINILKEVKKLEEESDGDLATGVSIVVRALEAPVRQIAENAGIDGSVIVERLKAVEEGVGFNAASGEMVDMVEEGIIDPTRVTRSALQNAASIAALLLTSEAAVAEIPSGDDDNQGGGMNPGMGGMM

SEQ ID NO: 2507 - DNA, 678 bp, Alloiococcus otitidis
  CDS (22)..(675)
gggcataaaggaggaagggctatgcgtttgatcagctctttattgaaaagtatttttttcatcatattaggctattggctagctgtttcccaagtcgctagcgggacccctattggcgacggcttagattgggtgatggactacctgcccattacctccgacttctgggatcaaaatgaccaggagccggagttggaccaagccagccgtcaagaagtaagccaccaggcaggcgggcaagatttaaccagtctggacatagacgaccaattgctgcgagagcaaattttagacctcaccaaccaaacccgggctgaccaaggcctcccccctctcagccagaatagcgacttagaactggcaggtgacataagagcccaagagacagttacctccttctcccatacccgcccggacggtcaagacttctttaccgtcctccaagacagtgaggccccacctaattaccaataccaagtcatcggagaaaatctggccatggcgacctaccatgtcgacgatgcccatatggcccggtacatcttccaaggctggttggatagccaaggccactacgaaaacatcatcaatcccagctacacccagatgggagtaggcgtagcctatgatgagggtatcctttatctgacccaattttttggccaccccatgccttaa

SEQ ID NO: 2508 - protein, 218 aa, Alloiococcus otitidis
MRLISSLLKSIFFIILGYWLAVSQVASGTPIGDGLDWVMDYLPITSDFWDQNDQEPELDQASRQEVSHQAGGQDLTSLDIDDQLLREQILDLTNQTRADQGLPPLSQNSDLELAGDIRAQETVTSFSHTRPDGQDFFTVLQDSEAPPNYQYQVIGENLAMATYHVDDAHMARYIFQGWLDSQGHYENIINPSYTQMGVGVAYDEGILYLTQFFGHPMP

SEQ ID NO: 2509 - DNA, 726 bp, Alloiococcus otitidis
  CDS (85)..(723)
cttagcagcagtaatctttacataaactatacttttacttgctatactaaaatcctaagtctattgatgaagggagttggcaaaatgggaagcttaatccagcttgaccaggtttgcttagaactcaaggacaagattattttacaagatatttcttttgccatcagccaaggagactttgtcaccctctacgggccatcagggagtggcaaatctagcctgttaaaattagtcgccagcctcatcaaacccacgagtgggaccatttattttaaaggccaggatatatttgcccaagacatcttagattaccggaaaaaggtgtcttatttttttcagaatcccgtcttgtttggccaaaccgtaagagataatctcagctttccctatcaaatccgccatttaaattttgaccaggaccgggctcttgacttgcttggccgggtcaagctcgaccagtctattttagacaagtcaattcaagatatttctggtggggaaaaacagagggtggctctggtccgcaacctcttatttccaccactggtcttgctcttggatgaaatcacctcttctttggaccgtgagaccagccagattatccaagacttgcttgaagacttattgactcaaggagcaaccatcttatcggtaagccacaaggaagaagatattaaccggtctagtcgcaaaattcagatcgctgatggaaggatggtcgattaa

SEQ ID NO: 2510 - protein, 213 aa, Alloiococcus otitidis
MGSLIQLDQVCLELKDKIILQDISFAISQGDFVTLYGPSGSGKSSLLKLVASLIKPTSGTIYFKGQDIFAQDILDYRKKVSYFFQNPVLFGQTVRDNLSFPYQIRHLNFDQDRALDLLGRVKLDQSILDKSIQDISGGEKQRVALVRNLLFPPLVLLLDEITSSLDRETSQIIQDLLEDLLTQGATILSVSHKEEDINRSSRKIQIADGRMVD

SEQ ID NO: 2511 - DNA, 726 bp, Alloiococcus otitidis; identical to SEQ ID NO: 2509
  CDS (67)..(723)

SEQ ID NO: 2512 - protein, 219 aa, Alloiococcus otitidis
MKGVGKMGSLIQLDQVCLELKDKIILQDISFAISQGDFVTLYGPSGSGKSSLLKLVASLIKPTSGTIYFKGQDIFAQDILDYRKKVSYFFQNPVLFGQTVRDNLSFPYQIRHLNFDQDRALDLLGRVKLDQSILDKSIQDISGGEKQRVALVRNLLFPPLVLLLDEITSSLDRETSQIIQDLLEDLLTQGATILSVSHKEEDINRSSRKIQIADGRMVD

SEQ ID NO: 2513 - DNA, 726 bp, Alloiococcus otitidis; identical to SEQ ID NO: 2509
  CDS (64)..(723)

SEQ ID NO: 2514 - protein, 220 aa, Alloiococcus otitidis
MMKGVGKMGSLIQLDQVCLELKDKIILQDISFAISQGDFVTLYGPSGSGKSSLLKLVASLIKPTSGTIYFKGQDIFAQDILDYRKKVSYFFQNPVLFGQTVRDNLSFPYQIRHLNFDQDRALDLLGRVKLDQSILDKSIQDISGGEKQRVALVRNLLFPPLVLLLDEITSSLDRETSQIIQDLLEDLLTQGATILSVSHKEEDINRSSRKIQIADGRMVD

SEQ ID NO: 2515 - DNA, 768 bp, Alloiococcus otitidis
  CDS (268)..(765)
agcttggaaggaagtgtagaaattaataacttgtcgcttttactgtcgacaagtttactggtcgttgctattgtaatctcttacaaggaaagtttgggcctgtccaaggatattgtcatcgctggggtccgggcagtaatccagctttttatcattggttttgtcctggaatatatttttgctatcgaccagcttgtcttaacccttttgatgatcgcctttattatctttaatgcctcttacaacagccatcaaagaagcaaaggcatgtcaggttcgcttaaaatatccctgacagctatcgggttctccagcctagttagcctcttgctccttgtcgtgaccggggccattgacctagtccccacccaggtcgtcccgatcaccgggatgattgccaatggggctatggtggcggtggggctcactttccaatccttggaccagcagtttaaagaccaccagcaggaagttcaggaaatgttgaccctaggagccagtcctctccaagcatccaagtcgatgattgcccaggccattaagaccgggatcagcccaaccattgactcgactaaaacagtgggtctggttagcctgccggggatgatgtctggcctcatctttgctggggttagccccatcctagccatccgctaccaaattgtcatcatgtttatgctggtttcggcctccagcattgccggcatcatagccagctacatggccttccgcaattactttaatgacttccaccaggttactagctaa

SEQ ID NO: 2516 - protein, 166 aa, Alloiococcus otitidis
MSGSLKISLTAIGFSSLVSLLLLVVTGAIDLVPTQVVPITGMIANGAMVAVGLTFQSLDQQFKDHQQEVQEMLTLGASPLQASKSMIAQAIKTGISPTIDSTKTVGLVSLPGMMSGLIFAGVSPILAIRYQIVIMFMLVSASSIAGIIASYMAFRNYFNDFHQVTS

SEQ ID NO: 2517 - DNA, 768 bp, Alloiococcus otitidis; identical to SEQ ID NO: 2515
  CDS (211)..(765)

SEQ ID NO: 2518 - protein, 185 aa, Alloiococcus otitidis
MIAFIIFNASYNSHQRSKGMSGSLKISLTAIGFSSLVSLLLLVVTGAIDLVPTQVVPITGMIANGAMVAVGLTFQSLDQQFKDHQQEVQEMLTLGASPLQASKSMIAQAIKTGISPTIDSTKTVGLVSLPGMMSGLIFAGVSPILAIRYQIVIMFMLVSASSIAGIIASYMAFRNYFNDFHQVTS

SEQ ID NO: 2519 - DNA, 768 bp, Alloiococcus otitidis; identical to SEQ ID NO: 2515
  CDS (4)..(765)

SEQ ID NO: 2520 - protein, 254 aa, Alloiococcus otitidis
MEGSVEINNLSLLLSTSLLVVAIVISYKESLGLSKDIVIAGVRAVIQLFIIGFVLEYIFAIDQLVLTLLMIAFIIFNASYNSHQRSKGMSGSLKISLTAIGFSSLVSLLLLVVTGAIDLVPTQVVPITGMIANGAMVAVGLTFQSLDQQFKDHQQEVQEMLTLGASPLQASKSMIAQAIKTGISPTIDSTKTVGLVSLPGMMSGLIFAGVSPILAIRYQIVIMFMLVSASSIAGIIASYMAFRNYFNDFHQVTS

SEQ ID NO: 2521 - DNA, 312 bp, Alloiococcus otitidis
  CDS (1)..(309)
atggtgttaccagtaataatcaagtggcggttggcaatgtcgttgacttgggttagggcgtcaactgaaatgccagtcgcttcagaaattccccaaagagtgtctccatctttaatggtgtattcaactggttcagattcttcttggttggccttttcttcttggatgtcagcgtggatttcttccacggttcttggggtccaagtagcggcctctacgtctgcttggttggcaaagacacttgaaagcaaggcagctgcaccagttgcgatcaatttattccgtaatttcatggtgaatgtctccttataa

SEQ ID NO: 2522 - protein, 103 aa, Alloiococcus otitidis
MVLPVIIKWRLAMSLTWVRASTEMPVASEIPQRVSPSLMVYSTGSDSSWLAFSSWMSAWISSTVLGVQVAASTSAWLAKTLESKAAAPVAINLFRNFMVNVSL

SEQ ID NO: 2523 - DNA, 354 bp, Alloiococcus otitidis
  CDS (106)..(351)
accgtcacctatagcgtaagcagttgcgttgaaggttccgatgaagctaccagtgtttgcagaagcttggtcttgaccttggttagaagctggttgagcgacaacttggcctgcttggtcgttagcttcctgatcttgagctgcttcttgggcttgttctggagcttgttcagcttcttgggcttgagcttcagcttgttcttgattttggtcttcttgaacaggtgcttcagcttgttcttgcctgtcttcttctctttcagtgacttcttgcggagtttcggtttctttaacttcttcgcttacctcataacttttcaattggtcattttcgtctttaacagaaaggactga

SEQ ID NO: 2524 - protein, 82 aa, Alloiococcus otitidis
MACLVVSFLILSCFLGLFWSLFSFLGLSFSLFLILVFLNRCFSLFLPVFFSFSDFLRSFGFFNFFAYLITFQLVIFVFNRKD

SEQ ID NO: 2525 - DNA, 993 bp, Alloiococcus otitidis
  CDS (58)..(990)
tatgatgaatgtgctaaaggaaatagaaaaaatactatttataaggagacattcaccatgaaattacggaataaattgatcgcaactggtgcagctgccttgctttcaagtgtctttgccaaccaagcagacgtagaggccgctacttggaccccaagaaccgtggaagaaatccacgctgacatccaagaagaaaaggccaaccaagaagaatctgaaccagttgaatacaccattaaagatggagacactctttggggaatttctgaagcgactggcatttcagttgacgccctaacccaagtcaacgacattgccaaccgccacttgattattactggtaacaccatttacttgagtgacgacaactcagtcctttctgttaaagacgaaaatgaccaattgaaaagttatgaggtaagcgaagaagttaaagaaaccgaaactccgcaagaagtcactgaaagagaagaagacaggcaagaacaagctgaagcacctgttcaagaagaccaaaatcaagaacaagctgaagctcaagcccaagaagctgaacaagctccagaacaagcccaagaagcagctcaagatcaggaagctaacgaccaagcaggccaagttgtcgctcaaccagcttctaaccaaggtcaagaccaagcttctgcaaacactggtagcttcatcggaaccttcaacgcaactgcttacgctataggtgacggtttaaccccaagcaccgttacagctaacggaactgacgtatccaacaccatctactctaacggccgtcgcattattgcagttgaccctaatgtcatcccacttaactcaactgtcattgttgaaatgcctaacggtagtcggttcactgcagtagcagctgacactggtggtgccatcaacggcaataccatcgacttattggtatctagcccagctgaagctcaaagctttggccgtcaaagtggcattaaaatttaccgagctaactaa

SEQ ID NO: 2526 - protein, 311 aa, Alloiococcus otitidis
MKLRNKLIATGAAALLSSVFANQADVEAATWTPRTVEEIHADIQEEKANQEESEPVEYTIKDGDTLWGISEATGISVDALTQVNDIANRHLIITGNTIYLSDDNSVLSVKDENDQLKSYEVSEEVKETETPQEVTEREEDRQEQAEAPVQEDQNQEQAEAQAQEAEQAPEQAQEAAQDQEANDQAGQVVAQPASNQGQDQASANTGSFIGTFNATAYAIGDGLTPSTVTANGTDVSNTIYSNGRRIIAVDPNVIPLNSTVIVEMPNGSRFTAVAADTGGAINGNTIDLLVSSPAEAQSFGRQSGIKIYRAN

SEQ ID NO: 2527 - DNA, 225 bp, Alloiococcus otitidis
  CDS (13)..(222)
ggagtggcagttatgaaaaaattaactcgcttaatgttaacttctatcttagctggatctttcttagtagcttgtaacaacaatgaagagccagctgaggaagaacctgcaacagaagaacccgcaactgaagaagaaacaactgaagaggatgcgactgtagaagaccctaccggtgaagaagcggtagaggaagaagaagcaggagacgaaaacgcaggttaa

SEQ ID NO: 2528 - protein, 70 aa, Alloiococcus otitidis
MKKLTRLMLTSILAGSFLVACNNNEEPAEEEPATEEPATEEETTEEDATVEDPTGEEAVEEEEAGDENAG

SEQ ID NO: 2529 - DNA, 1188 bp, Alloiococcus otitidis
  CDS (70)..(1185)
ttagccgaccaaagtcttgcctgtagatttcagcctgtctactctataataagtttaggaggaatcattatgagagatacacaagcaataattaatttaaagcatttagaagacaatgtcaaagccttaaccaaacatatttcaaaaaatagtaaattatgtggcgtggtcaaggccaatgcctatggtcacggggctgtagaagtggctaaaagactccaagcgaccggagtggacttcttggctgttgccttggctcaagaagccatcgagttaagacaagccggcattgacctaccgatcttggttttgaccccggtcaccaatgaagaggaactcgagctagtcattcaaaacaaaatccgaatcacctgttttagaccagaccatgcccgagtcatcaaccgtctagcccaagcattaaacaccaaagcctacgtccacttgaaggtggattccggcatgtcccggatcggcgtccaaaacgccgaccaagggcaagcagttttagaagaactagaagaccgaaactgcctggttgaggggatctacacccactttgcggatgcagataatatggacgaagaggactttacccgccagcaatttgaccacttccaaactgttttccaaactttagaagaccagggtcaccactttgctatcaagcatgcctgtaactctgctgctaccctccgctttccggaataccacttagacatggtccgggtgggaatctgcctttacggttatccgccagcctcagatatggctggtttggttgacctgaaacccttgatgaccgtcaagaccaaactagcccatgtcaaacccttagaaaaagagcgttatatcggctacaaccggacctatcagatggaccaggatgggaaaattggtaccctggttattggctatgctgacggggtcttccgcagtttatccaataagggctacttcctctaccaaggtcaaaaattgccgattgtgggccgggtttgcatggaccaattaatggtagacctcagccaggtcccagatattgaagttggggatgaagtcacctggttcagccctgaaagccaagatacctattccctctttgaaatcggcgaccaggctgttagctcccactatgaaatcctcacccggatcagcccccgcatccctcgaatctaccaaggctaa

SEQ ID NO: 2530 - protein, 372 aa, Alloiococcus otitidis
MRDTQAIINLKHLEDNVKALTKHISKNSKLCGVVKANAYGHGAVEVAKRLQATGVDFLAVALAQEAIELRQAGIDLPILVLTPVTNEEELELVIQNKIRITCFRPDHARVINRLAQALNTKAYVHLKVDSGMSRIGVQNADQGQAVLEELEDRNCLVEGIYTHFADADNMDEEDFTRQQFDHFQTVFQTLEDQGHHFAIKHACNSAATLRFPEYHLDMVRVGICLYGYPPASDMAGLVDLKPLMTVKTKLAHVKPLEKERYIGYNRTYQMDQDGKIGTLVIGYADGVFRSLSNKGYFLYQGQKLPIVGRVCMDQLMVDLSQVPDIEVGDEVTWFSPESQDTYSLFEIGDQAVSSHYEILTRISPRIPRIYQG

SEQ ID NO: 2531 - DNA, 1131 bp, Alloiococcus otitidis
  CDS (760)..(1128)
tcggtcaaagtagtggaaaaggagtatgatatgcagtatttaaaaaaatcaaaactatttgccatactggtggcggtcatcctagttggcttggctatcatggttttctctacggttgactttatattctacccgatcggtgccttgtttgaaagtctctttcctatctttctaattacaggctttatcttttatatctttttgcccgtctatgaattcctagataagaagatacataatgatgggatcactattcccctagtccttcttctcattattctcattctctattttcttatttcggcctttttacctgaaattatcaagcagatttccaatctcatttcgattacaccggggattgtcagtgacttggtggcttttattgaaagtttagtcgatgaatacaatatttctagccaagaagtctacaattaccttagcaacttagacctttctgtaacgaatatcttaactaatattttaaaccagttaacctctggctttgggaactttctgtcggtgaccatcaattccttggtcattatcgccactgttcccttggtcttgatctacctctttaaagaaaacgaaaaggtccctaagaatatcttgcaatttgtctcacccaagtacaagacacttgccttagatttattaaccgctttccacgaaaacgccaaaaaatacattgggggccgggtcttggtctgcgtgtttgtaggaatctcttcttatattatttacctcctacttggattgcccaatgccatgctctttggtctcttcagtgctgttgctgacttaatcccttacttcggtccctttatcggggcagccccagccttctttgtagccctatccatgtctccattgcgagctttggccttggtggtattaattaccatcctccagcaaatcgagtcctatgtcttcactccatttgttatgggcaacagcttggacctgcacccagtgacagtcgtggtcttggttatctttgccaaagacgcttttggtgtcttggggatggtcttgatcttaccagcttatgctattatcaagggctgtgccattgttttgatgaactacttgagggacaagaagggaattcaaatcaagtatgattaa

SEQ ID NO: 2532 - protein, 123 aa, Alloiococcus otitidis
MPNAMLFGLFSAVADLIPYFGPFIGAAPAFFVALSMSPLRALALVVLITILQQIESYVFTPFVMGNSLDLHPVTVVVLVIFAKDAFGVLGMVLILPAYAIIKGCAIVLMNYLRDKKGIQIKYD

SEQ ID NO: 2533 - DNA, 1131 bp, Alloiococcus otitidis; identical to SEQ ID NO: 2531
  CDS (31)..(1128)

SEQ ID NO: 2534 - protein, 366 aa, Alloiococcus otitidis
MQYLKKSKLFAILVAVILVGLAIMVFSTVDFIFYPIGALFESLFPIFLITGFIFYIFLPVYEFLDKKIHNDGITIPLVLLLIILILYFLISAFLPEIIKQISNLISITPGIVSDLVAFIESLVDEYNISSQEVYNYLSNLDLSVTNILTNILNQLTSGFGNFLSVTINSLVIIATVPLVLIYLFKENEKVPKNILQFVSPKYKTLALDLLTAFHENAKKYIGGRVLVCVFVGISSYIIYLLLGLPNAMLFGLFSAVADLIPYFGPFIGAAPAFFVALSMSPLRALALVVLITILQQIESYVFTPFVMGNSLDLHPVTVVVLVIFAKDAFGVLGMVLILPAYAIIKGCAIVLMNYLRDKKGIQIKYD

SEQ ID NO: 2535 - DNA, 1131 bp, Alloiococcus otitidis; identical to SEQ ID NO: 2531
  CDS (13)..(1128)

SEQ ID NO: 2536 - protein, 372 aa, Alloiococcus otitidis
MEKEYDMQYLKKSKLFAILVAVILVGLAIMVFSTVDFIFYPIGALFESLFPIFLITGFIFYIFLPVYEFLDKKIHNDGITIPLVLLLIILILYFLISAFLPEIIKQISNLISITPGIVSDLVAFIESLVDEYNISSQEVYNYLSNLDLSVTNILTNILNQLTSGFGNFLSVTINSLVIIATVPLVLIYLFKENEKVPKNILQFVSPKYKTLALDLLTAFHENAKKYIGGRVLVCVFVGISSYIIYLLLGLPNAMLFGLFSAVADLIPYFGPFIGAAPAFFVALSMSPLRALALVVLITILQQIESYVFTPFVMGNSLDLHPVTVVVLVIFAKDAFGVLGMVLILPAYAIIKGCAIVLMNYLRDKKGIQIKYD

SEQ ID NO: 2537 - DNA, 1305 bp, Alloiococcus otitidis
  CDS (1)..(1302)
atggattcaaattatttgtccagtatccttatattcttgttttttgtggtgctttcagcttatttctcctcgtctgaaactgcttttacctcagttagggaaaccaagctgaaaatccaggccaaaaatggagacaagcaggcagcccgcaccttgaaattgcaagagaatttcgatgatgttttatccaccatcttaattggcaataactttgccaatatcgctgcttcagctatcgcaacggtttttttcgttgacctttaccccagatatggggccaccatttctactattgtaaccaccatccttctcttgatcttggctgaaataaccccaaaattactggccaagatggttcccgaacccatcgccaagatgacttcacccgtcttaaacttcttactggtcctctttaaacccttgatttggttgctcggtcagtggcaaaagttggtaaaaataatcgtcccaatctctccttcagagtcccttagtgaagaagaactcctgtccatggtagatgaagcccgggtggacgggtcgattgagtcagaagagcataaattggtcaaggcagctattgaatttgatgatgtcgaagtctcttccatcctaacaccccgggttgacgtggtaggggtggatatagaagacagtgatgataccattgaagagacctttgaccaaaaccccttttctcgacttattgtttatgatgaatccgtggacagcgtggtgggagtccttcaccaaaaggactttaaccgctacttaagagccaagcagaggggggccttgaaagtccagtcggtggtcaacttagtgaccgaagtcctctatgtcccacctatgatcaagctttttgacctcctccgccttatgcaacgcaacaagaaccatatggctgttgtcgtcgatgagcatggggggatgaccggtattgccaccatggaagatgccctagaggagttggttggcgaaatttgggatgaaacggatgaagttgaaaatgagatagaggttcttgaggaagggtctaaaatccgggtcaaggggacctacccgatcgaaaaactcctagctagcctcaacttgcctgttttagatgactggttatccaataccgtctcaggttttatgatagagcaattggagcgggtgcccgagtccaatgactctttcatttatgagggttacgaatttttagtcttggatgcgcaaaagcggcgggtcaatgaagttttggttgaaaaaattgatcctgctgctgattcagatgaaccggatgattcagatgcagattga

SEQ ID NO: 2538 - protein, 434 aa, Alloiococcus otitidis
MDSNYLSSILIFLFFVVLSAYFSSSETAFTSVRETKLKIQAKNGDKQAARTLKLQENFDDVLSTILIGNNFANIAASAIATVFFVDLYPRYGATISTIVTTILLLILAEITPKLLAKMVPEPIAKMTSPVLNFLLVLFKPLIWLLGQWQKLVKIIVPISPSESLSEEELLSMVDEARVDGSIESEEHKLVKAAIEFDDVEVSSILTPRVDVVGVDIEDSDDTIEETFDQNPFSRLIVYDESVDSVVGVLHQKDFNRYLRAKQRGALKVQSVVNLVTEVLYVPPMIKLFDLLRLMQRNKNHMAVVVDEHGGMTGIATMEDALEELVGEIWDETDEVENEIEVLEEGSKIRVKGTYPIEKLLASLNLPVLDDWLSNTVSGFMIEQLERVPESNDSFIYEGYEFLVLDAQKRRVNEVLVEKIDPAADSDEPDDSDAD

SEQ ID NO: 2539 - DNA, 789 bp, Alloiococcus otitidis
  CDS (22)..(786)
accaagcaggaggcagaaagaatgaccggaaataaatttaccagagaatttaccctacccccttatttaagtgaccgttaccgtaatattcctttaaccaccctgagctccattttagtatctgtcttaggccagcaaagtgaagaactcggtcaagaggcagaacttgaagcttatttcaaagagaaaaacctgtcttggataattctcaaatttgacatggacattgatcgccagccagatgctggtgaaaagctaagggtggagacctatgccacaggttacaacaaacttttttgctaccggcaaattgatgcttatgatgaacaaggggacctggttgtccagtctacggtcacctatgcctggttcgatatgaccaaacgcaaactggcccggttagacccagacatcatgaccctatacggggcagactacgaaaaaagaattcgccggatgaagacgcctgaatttgaccctgaccaggcttcagagggagaccattttgaagttacttattttgatattgatatcaataaccacgtgaactttactatttaccttaaatgggccatccagtccttgggggttgattttatgaaccgccaccgggttcaatctttgtccatcaagtatgacaaggaagttttagaaggggaagaggtcaccgttaaaaccagcttgagtccagaagaagacggacaagttcaaaccatctccaaagtagaaagtagccgggacaatgccactgttgtcctggactgggtccagcggcaaaatcaagactag

SEQ ID NO: 2540 - protein, 255 aa, Alloiococcus otitidis
MTGNKFTREFTLPPYLSDRYRNIPLTTLSSILVSVLGQQSEELGQEAELEAYFKEKNLSWIILKFDMDIDRQPDAGEKLRVETYATGYNKLFCYRQIDAYDEQGDLVVQSTVTYAWFDMTKRKLARLDPDIMTLYGADYEKRIRRMKTPEFDPDQASEGDHFEVTYFDIDINNHVNFTIYLKWAIQSLGVDFMNRHRVQSLSIKYDKEVLEGEEVTVKTSLSPEEDGQVQTISKVESSRDNATVVLDWVQRQNQD

SEQ ID NO: 2541 - DNA, 1581 bp, Alloiococcus otitidis
  CDS (943)..(1578)
actatcattcttggaaaggatttgatcaaaatggatcaaaatactgctaaccagcagcaaaattctggtttcttcgcctggattgagcgggtcgggaacaagctcccccaccctgtttttatttttatcatcttggcggctatcgtcatccttgcttcaggtattgctgacttatctggactcgccctagactataccgacccaactggtgaagaagtgaccgtggctgctgaatccctcctaagtgtggatgggattaactatatctttaacagcgccgtggaaaacttcacttccttcgctccactgggaacagtactggtggctatgttaggggtcgggattgcagaatggaccggtctgatttcctcaaccttgaagaacttgctctccgatgtccctcccttcctcttgtcagctgctgtggtctttgccggggtcatctctaacattgcctcagatgtcggttacgttgttatcatccctctaggtgctgttatttttgccggagctggccgccaccccattgccggtttagctgctgccttcgctggagtttcagctggtttctctgccaacttattgcccggtccaactgatgccctcttggttgggattactgaagaagccttggatgcagcgaatattacatacgatattcaagtaactgctaactggtacttcatcattgcttcctctttcgttttgaccatcgtgggggccatcgtgacagacaagtttgtggaacccaaattaggtgaatacaatggggagtttgtcccagaccaagagcccttgaccgaccttgaacaccgaggcctgcgcaatgccttgattgctctgatcatttacgcaatcgtcatggtttacctcatgtttgacttcaacctccctttcagtggaatcctccaatcctttgacgaaactgctgaagcagtcaacttgaacaacttcatgtcagctggtttgctcttggctatcttcttcctctttgccataccaggtaccgtttacggtgtaaccattaacaagattaaagataccaaagactgggtaacaggcatgtctgaagccatgagctccatgggggcttacattgtcttagctttctttgcggcccaactgattaattactttaactacaccaacttagggaccattattgctgttgccggagctaactttcttgaatccatttctctaactggtatccccctcatcttaggttttgtcttggtggctgcctttatcaacctcttcatcggttcagcttcagccaaatgggctatcctatcccccatcttcacaccaatgttctataacctaaacttaacccctgagatgaccttgatggcctaccggattgccgactctaccaccaatattatttcaccactgatgaactactttgctatggtgattgtcttcacccaacgctatgacaaggactcggggattggaaccctaatttcaaccatgttgatctactcgattaccttcttaatcacctggaccatcctcttgatcatctggtacctcttgggtctcccacttggtccaaatgcacctattgccttttaa

SEQ ID NO: 2542 - protein, 212 aa, Alloiococcus otitidis
MNNFMSAGLLLAIFFLFAIPGTVYGVTINKIKDTKDWVTGMSEAMSSMGAYIVLAFFAAQLINYFNYTNLGTIIAVAGANFLESISLTGIPLILGFVLVAAFINLFIGSASAKWAILSPIFTPMFYNLNLTPEMTLMAYRIADSTTNIISPLMNYFAMVIVFTQRYDKDSGIGTLISTMLIYSITFLITWTILLIIWYLLGLPLGPNAPIAF

SEQ ID NO: 2543 - DNA, 1581 bp, Alloiococcus otitidis; identical to SEQ ID NO: 2541
  CDS (376)..(1578)

SEQ ID NO: 2544 - protein, 401 aa, Alloiococcus otitidis
MKNLLSDVPPFLLSAAVVFAGVISNIASDVGYVVIIPLGAVIFAGAGRHPIAGLAAAFAGVSAGFSANLLPGPTDALLVGITEEALDAANITYDIQVTANWYFIIASSFVLTIVGAIVTDKFVEPKLGEYNGEFVPDQEPLTDLEHRGLRNALIALIIYAIVMVYLMFDFNLPFSGILQSFDETAEAVNLNNFMSAGLLLAIFFLFAIPGTVYGVTINKIKDTKDWVTGMSEAMSSMGAYIVLAFFAAQLINYFNYTNLGTIIAVAGANFLESISLTGIPLILGFVLVAAFINLFIGSASAKWAILSPIFTPMFYNLNLTPEMTLMAYRIADSTTNIISPLMNYFAMVIVFTQRYDKDSGIGTLISTMLIYSITFLITWTILLIIWYLLGLPLGPNAPIAF

SEQ ID NO: 2545 - DNA, 1581 bp, Alloiococcus otitidis; identical to SEQ ID NO: 2541
  CDS (280)..(1578)

SEQ ID NO: 2546 - protein, 433 aa, Alloiococcus otitidis
MENFTSFAPLGTVLVAMLGVGIAEWTGLISSTLKNLLSDVPPFLLSAAVVFAGVISNIASDVGYVVIIPLGAVIFAGAGRHPIAGLAAAFAGVSAGFSANLLPGPTDALLVGITEEALDAANITYDIQVTANWYFIIASSFVLTIVGAIVTDKFVEPKLGEYNGEFVPDQEPLTDLEHRGLRNALIALIIYAIVMVYLMFDFNLPFSGILQSFDETAEAVNLNNFMSAGLLLAIFFLFAIPGTVYGVTINKIKDTKDWVTGMSEAMSSMGAYIVLAFFAAQLINYFNYTNLGTIIAVAGANFLESISLTGIPLILGFVLVAAFINLFIGSASAKWAILSPIFTPMFYNLNLTPEMTLMAYRIADSTTNIISPLMNYFAMVIVFTQRYDKDSGIGTLISTMLIYSITFLITWTILLIIWYLLGLPLGPNAPIAF

SEQ ID NO: 2547 - DNA, 1581 bp, Alloiococcus otitidis; identical to SEQ ID NO: 2541
  CDS (31)..(1578)

SEQ ID NO: 2548 - protein, 516 aa, Alloiococcus otitidis
MDQNTANQQQNSGFFAWIERVGNKLPHPVFIFIILAAIVILASGIADLSGLALDYTDPTGEEVTVAAESLLSVDGINYIFNSAVENFTSFAPLGTVLVAMLGVGIAEWTGLISSTLKNLLSDVPPFLLSAAVVFAGVISNIASDVGYVVIIPLGAVIFAGAGRHPIAGLAAAFAGVSAGFSANLLPGPTDALLVGITEEALDAANITYDIQVTANWYFIIASSFVLTIVGAIVTDKFVEPKLGEYNGEFVPDQEPLTDLEHRGLRNALIALIIYAIVMVYLMFDFNLPFSGILQSFDETAEAVNLNNFMSAGLLLAIFFLFAIPGTVYGVTINKIKDTKDWVTGMSEAMSSMGAYIVLAFFAAQLINYFNYTNLGTIIAVAGANFLESISLTGIPLILGFVLVAAFINLFIGSASAKWAILSPIFTPMFYNLNLTPEMTLMAYRIADSTTNIISPLMNYFAMVIVFTQRYDKDSGIGTLISTMLIYSITFLITWTILLIIWYLLGLPLGPNAPIAF

SEQ ID NO: 2549 - DNA, 1581 bp, Alloiococcus otitidis; identical to SEQ ID NO: 2541
  CDS (22)..(1578)

SEQ ID NO: 2550 - protein, 519 aa, Alloiococcus otitidis
MIKMDQNTANQQQNSGFFAWIERVGNKLPHPVFIFIILAAIVILASGIADLSGLALDYTDPTGEEVTVAAESLLSVDGINYIFNSAVENFTSFAPLGTVLVAMLGVGIAEWTGLISSTLKNLLSDVPPFLLSAAVVFAGVISNIASDVGYVVIIPLGAVIFAGAGRHPIAGLAAAFAGVSAGFSANLLPGPTDALLVGITEEALDAANITYDIQVTANWYFIIASSFVLTIVGAIVTDKFVEPKLGEYNGEFVPDQEPLTDLEHRGLRNALIALIIYAIVMVYLMFDFNLPFSGILQSFDETAEAVNLNNFMSAGLLLAIFFLFAIPGTVYGVTINKIKDTKDWVTGMSEAMSSMGAYIVLAFFAAQLINYFNYTNLGTIIAVAGANFLESISLTGIPLILGFVLVAAFINLFIGSASAKWAILSPIFTPMFYNLNLTPEMTLMAYRIADSTTNIISPLMNYFAMVIVFTQRYDKDSGIGTLISTMLIYSITFLITWTILLIIWYLLGLPLGPNAPIAF

SEQ ID NO: 2551 - DNA, 645 bp, Alloiococcus otitidis
  CDS (28)..(642)
tcactttttaataagggagtgaccttcatgaaaattcacaaactcatcaccgggcctgtccaggaaaactgttacattctggaaaaagatggccaggccctggtggttgacccgggttcggacggggagcggatcattcataaaattgaagacctgaacttaaagcctcttcacatcctcctgacccacgcccactttgaccatattggagccttggaccaggttagggactattaccatatcccggccagcatccatgaaatcgaaaaggactacctacttgaccctgacctaaacttttctagcatgacggggcagccctttacctgccagcctgccgaccacttgtttacagaggaagttgagttagagataggaccctttgactttaaagtagtccacactcccggccactctcctgggtctgtttcctttattttccaatctgacaaacaagttatcgctggcgacgccctcttcagggaaagtatcggccggactgattcctttaatgctgatggcccaaccttgctggacagtatccagaccaaactccttagcctagacgatgactttactgtttacccaggccatggtcaggctacaagtattggccatgagaaaagctacaacccatttttctaa

SEQ ID NO: 2552 - protein, 205 aa, Alloiococcus otitidis
MKIHKLITGPVQENCYILEKDGQALVVDPGSDGERIIHKIEDLNLKPLHILLTHAHFDHIGALDQVRDYYHIPASIHEIEKDYLLDPDLNFSSMTGQPFTCQPADHLFTEEVELEIGPFDFKVVHTPGHSPGSVSFIFQSDKQVIAGDALFRESIGRTDSFNADGPTLLDSIQTKLLSLDDDFTVYPGHGQATSIGHEKSYNPFF

SEQ ID NO: 2553 - DNA, 645 bp, Alloiococcus otitidis; identical to SEQ ID NO: 2551
  CDS (19)..(642)

SEQ ID NO: 2554 - protein, 208 aa, Alloiococcus otitidis
MTFMKIHKLITGPVQENCYILEKDGQALVVDPGSDGERIIHKIEDLNLKPLHILLTHAHFDHIGALDQVRDYYHIPASIHEIEKDYLLDPDLNFSSMTGQPFTCQPADHLFTEEVELEIGPFDFKVVHTPGHSPGSVSFIFQSDKQVIAGDALFRESIGRTDSFNADGPTLLDSIQTKLLSLDDDFTVYPGHGQATSIGHEKSYNPFF

SEQ ID NO: 2555 - DNA, 1263 bp, Alloiococcus otitidis
  CDS (952)..(1260)
aagcattgtattatattattaaaaaatagaggaggtttccttgtgagtaaggaaaacaaagagaagaaacttggactcttgccgcaattaatcgctgcgattgccttgggggctttggtaggtcagatgtcttttattccggactttatcttacaaataccggtgactttttcagacctgtttgggaacattctgaatttttttatccccttgatgatcgttggctttattgtgaaagggattgccgacttgtcagaaggggtaggtcgcctacttggggcgactgcaggtatttcctacttgtctaccttaattgcaggattggttgcctacctcatagccagttgggtttttcccttatttatccaaccaggccaggcaacagttgaagtcacaggtcaaggcttagatcccatttttatggtggagattccgcctatgtttgaggtgacctcggccattgtcttttcctttatgtttggcattaccatttcatggttaagaagcaaaaaaaattcctatggcatgtataacttttttgatgaatttaaccagtcggtcagtcttatccttgataaatttattgttccatttctccccttatttatctttggcaattttgttaacttgtcctacacaggaacttttggggcaatcttttcagtcttttggcgggtctttctcatcattatcacccttcattgggtcttcattattctttggtatattattgcgggaacctatgctggtaagaagcccatggatttaatcaagaaccaattaaccggttatattgcagctgttggtctccaatcttctgctgccgctattcctatcaacttggaaattgctcaaaagaatggggtttccaaggaaattcgtgattttgtcattcccttttgttcaacagcccacttgatggggagtatgatttccatcacttccagtgtaatggccgttctgatgctaaatgatatggccaatgactttactatcatggctcctttcatcatcaccttaggtattgttatggtagcagcccctggagccccagggggagccattatatcggccttgcccttcctgaccatggtagggattgacccttctggtagtctggcttcccttctggtttcccttcatatggcccaggacagctttggtacagcgacaaatatttcaggggacaatgcaatcgcggttttaattgataaatggtttaacaaaaataccaacagtaaccaagctagccaaggtaagtaa

SEQ ID NO: 2556 - protein, 103 aa, Alloiococcus otitidis
MAVLMLNDMANDFTIMAPFIITLGIVMVAAPGAPGGAIISALPFLTMVGIDPSGSLASLLVSLHMAQDSFGTATNISGDNAIAVLIDKWFNKNTNSNQASQGK

SEQ ID NO: 2557 - DNA, 1263 bp, Alloiococcus otitidis; identical to SEQ ID NO: 2555
  CDS (250)..(1260)

SEQ ID NO: 2558 - protein, 337 aa, Alloiococcus otitidis
MSEGVGRLLGATAGISYLSTLIAGLVAYLIASWVFPLFIQPGQATVEVTGQGLDPIFMVEIPPMFEVTSAIVFSFMFGITISWLRSKKNSYGMYNFFDEFNQSVSLILDKFIVPFLPLFIFGNFVNLSYTGTFGAIFSVFWRVFLIIITLHWVFIILWYIIAGTYAGKKPMDLIKNQLTGYIAAVGLQSSAAAIPINLEIAQKNGVSKEIRDFVIPFCSTAHLMGSMISITSSVMAVLMLNDMANDFTIMAPFIITLGIVMVAAPGAPGGAIISALPFLTMVGIDPSGSLASLLVSLHMAQDSFGTATNISGDNAIAVLIDKWFNKNTNSNQASQGK

SEQ ID NO: 2559 - DNA, 1263 bp, Alloiococcus otitidis; identical to SEQ ID NO: 2555
  CDS (127)..(1260)

SEQ ID NO: 2560 - protein, 378 aa, Alloiococcus otitidis
MSFIPDFILQIPVTFSDLFGNILNFFIPLMIVGFIVKGIADLSEGVGRLLGATAGISYLSTLIAGLVAYLIASWVFPLFIQPGQATVEVTGQGLDPIFMVEIPPMFEVTSAIVFSFMFGITISWLRSKKNSYGMYNFFDEFNQSVSLILDKFIVPFLPLFIFGNFVNLSYTGTFGAIFSVFWRVFLIIITLHWVFIILWYIIAGTYAGKKPMDLIKNQLTGYIAAVGLQSSAAAIPINLEIAQKNGVSKEIRDFVIPFCSTAHLMGSMISITSSVMAVLMLNDMANDFTIMAPFIITLGIVMVAAPGAPGGAIISALPFLTMVGIDPSGSLASLLVSLHMAQDSFGTATNISGDNAIAVLIDKWFNKNTNSNQASQGK

SEQ ID NO: 2561 - DNA, 1263 bp, Alloiococcus otitidis; identical to SEQ ID NO: 2555
  CDS (79)..(1260)

SEQ ID NO: 2562 - protein, 394 aa, Alloiococcus otitidis
MPQLIAAIALGALVGQMSFIPDFILQIPVTFSDLFGNILNFFIPLMIVGFIVKGIADLSEGVGRLLGATAGISYLSTLIAGLVAYLIASWVFPLFIQPGQATVEVTGQGLDPIFMVEIPPMFEVTSAIVFSFMFGITISWLRSKKNSYGMYNFFDEFNQSVSLILDKFIVPFLPLFIFGNFVNLSYTGTFGAIFSVFWRVFLIIITLHWVFIILWYIIAGTYAGKKPMDLIKNQLTGYIAAVGLQSSAAAIPINLEIAQKNGVSKEIRDFVIPFCSTAHLMGSMISITSSVMAVLMLNDMANDFTIMAPFIITLGIVMVAAPGAPGGAIISALPFLTMVGIDPSGSLASLLVSLHMAQDSFGTATNISGDNAIAVLIDKWFNKNTNSNQASQGK

SEQ ID NO: 2563 - DNA, 1263 bp, Alloiococcus otitidis; identical to SEQ ID NO: 2555
  CDS (43)..(1260)

SEQ ID NO: 2564 - protein, 406 aa, Alloiococcus otitidis
MSKENKEKKLGLLPQLIAAIALGALVGQMSFIPDFILQIPVTFSDLFGNILNFFIPLMIVGFIVKGIADLSEGVGRLLGATAGISYLSTLIAGLVAYLIASWVFPLFIQPGQATVEVTGQGLDPIFMVEIPPMFEVTSAIVFSFMFGITISWLRSKKNSYGMYNFFDEFNQSVSLILDKFIVPFLPLFIFGNFVNLSYTGTFGAIFSVFWRVFLIIITLHWVFIILWYIIAGTYAGKKPMDLIKNQLTGYIAAVGLQSSAAAIPINLEIAQKNGVSKEIRDFVIPFCSTAHLMGSMISITSSVMAVLMLNDMANDFTIMAPFIITLGIVMVAAPGAPGGAIISALPFLTMVGIDPSGSLASLLVSLHMAQDSFGTATNISGDNAIAVLIDKWFNKNTNSNQASQGK

SEQ ID NO: 2565 - DNA, 432 bp, Alloiococcus otitidis
  CDS (106)..(429)
tttcacaagaaaaaaggagggttcaagtatgatttatcttgtcttgccgacttaaacagttgtatacttagtccaatctttttgaaaactgaaggaggtttcctaatgagtcaggaaaaaaagaagaaaaaatttgggctcctgccccagttgattgtagctattatccttggtgccctggtcggtcaaatgacatttatcccagagattatcttgcaaatcccggtaaccttttccgatttgttcgggaatattttaagcttttttatccccttaatgattgttggttttattgttaaagggatagccgacctgtccgaaggggctggccggcttttaggggctactgctggtattgcttacctgtccactttaatagccgggcacggtcgcctatttagttgcgaattttgttttccctttatttattga

SEQ ID NO: 2566 - protein, 108 aa, Alloiococcus otitidis
MSQEKKKKKFGLLPQLIVAIILGALVGQMTFIPEIILQIPVTFSDLFGNILSFFIPLMIVGFIVKGIADLSEGAGRLLGATAGIAYLSTLIAGHGRLFSCEFCFPFIY

SEQ ID NO: 2567 - DNA, 432 bp, Alloiococcus otitidis; identical to SEQ ID NO: 2565
  CDS (82)..(429)

SEQ ID NO: 2568 - protein, 116 aa, Alloiococcus otitidis
MKTEGGFLMSQEKKKKKFGLLPQLIVAIILGALVGQMTFIPEIILQIPVTFSDLFGNILSFFIPLMIVGFIVKGIADLSEGAGRLLGATAGIAYLSTLIAGHGRLFSCEFCFPFIY

SEQ ID NO: 2569 - DNA, 951 bp, Alloiococcus otitidis
  CDS (715)..(948)
ccgggcacggtcgcctatttagttgcgaattttgttttccctttatttattgaagtaggcacctttgtaggtgaagcagaaggggagggcttggctccgatttttacggtcgaaattccagccatgtttgaagtgacttctgctatcgtctttgcctttatgttcgggatcactatttcctggttgcgaactaacaaagagtcctatgccatgtacaattttttcgatgaatttaaccaatccgttatctttgtcctggaaagatttatcgtccccctcttgcctttctttatcttcgggaactttatcaacctatcttacgctggaacttttggcactatcttgtctgttttttggcgggtcttcttggtcatacttatcctgcactgggtctttatcatcctctggtttgtcttggccgggtcctatgctggcaagaacccatggactttaatcaaaaaccaattatccggctatattgcggctgttggactccaatcatcagcggctactatccctattaacttagaaatcgcaagaaaaaacggtgtctcacaaaaaattcgtgactttgttgtccccttctgtgcgaccgcccacctgatggggagtatgattaccattacctcctgtgtcatggctgttctcatgatgaacgacatgccttctaattatggcatcatcgggccttttatcatcaccttagggattgccatggttgcggcaccaggagctccaggcggggccatcatggcagccttacctttcttggggatggtggggatcgacccgtctggtgccctggcttctttactggtctccctctatattgcccaggatagctttggaacagccaccaatatttcaggcgacaacgccattgccgttctgattgacaagtggtttaacaaaaatataggcggaggcgacataaaccaagccagtgattaa

SEQ ID NO: 2570 - protein, 78 aa, Alloiococcus otitidis
MVAAPGAPGGAIMAALPFLGMVGIDPSGALASLLVSLYIAQDSFGTATNISGDNAIAVLIDKWFNKNIGGGDINQASD

SEQ ID NO: 2571 - DNA, 951 bp, Alloiococcus otitidis; identical to SEQ ID NO: 2569
  CDS (637)..(948)

SEQ ID NO: 2572 - protein, 104 aa, Alloiococcus otitidis
MAVLMMNDMPSNYGIIGPFIITLGIAMVAAPGAPGGAIMAALPFLGMVGIDPSGALASLLVSLYIAQDSFGTATNISGDNAIAVLIDKWFNKNIGGGDINQASD

SEQ ID NO: 2573 - DNA, 951 bp, Alloiococcus otitidis; identical to SEQ ID NO: 2569
  CDS (124)..(948)

SEQ ID NO: 2574 - protein, 275 aa, Alloiococcus otitidis
MFEVTSAIVFAFMFGITISWLRTNKESYAMYNFFDEFNQSVIFVLERFIVPLLPFFIFGNFINLSYAGTFGTILSVFWRVFLVILILHWVFIILWFVLAGSYAGKNPWTLIKNQLSGYIAAVGLQSSAATIPINLEIARKNGVSQKIRDFVVPFCATAHLMGSMITITSCVMAVLMMNDMPSNYGIIGPFIITLGIAMVAAPGAPGGAIMAALPFLGMVGIDPSGALASLLVSLYIAQDSFGTATNISGDNAIAVLIDKWFNKNIGGGDINQASD

SEQ ID NO: 2575 - DNA, 951 bp, Alloiococcus otitidis; identical to SEQ ID NO: 2569
  CDS (91)..(948)

SEQ ID NO: 2576 - protein, 286 aa, Alloiococcus otitidis
MAPIFTVEIPAMFEVTSAIVFAFMFGITISWLRTNKESYAMYNFFDEFNQSVIFVLERFIVPLLPFFIFGNFINLSYAGTFGTILSVFWRVFLVILILHWVFIILWFVLAGSYAGKNPWTLIKNQLSGYIAAVGLQSSAATIPINLEIARKNGVSQKIRDFVVPFCATAHLMGSMITITSCVMAVLMMNDMPSNYGIIGPFIITLGIAMVAAPGAPGGAIMAALPFLGMVGIDPSGALASLLVSLYIAQDSFGTATNISGDNAIAVLIDKWFNKNIGGGDINQASD

SEQ ID NO: 2577 - DNA, 1266 bp, Alloiococcus otitidis
  CDS (31)..(1263)
tggtgtggtaagatagaggaggaaacaggaatgaccaagcaatattttgacaaagaaatttttgcaacaattgagaaggagaggcaaagacaagaagacaatattgaattgattgcttctgaaaactttgtctctgaagaagttttacaggctcaagggtctattttgaccaacaagtacgcagaaggctaccctggcaaacgctattatgggggctgtgaatttgtcgatgtcatcgagcagttggccatagaccgggtcaaagacttgttcgaagctgattatgccaatgtccaaccccactccgggtcccaggccaataacgccgtcttccaagccctgctccagcctggggacacttacttgggtatggacttgagccacggggggcacttaacccacgggtctccggttaacttttctggcattttgtatcatgctgtccactacggagttaacaaggaaacagaactaattgactacgaccaagtccgccaactcgccatagaccaccagccaaagatgatcattgctggctactcggcctatccaagggagttggactttaagaagtttagagacattgctgacgaggttggtgcctatctgatggtggatatggcccactttgctggtttagtcgcagcaggcgtctatcctgaccctgttccttatgcggatgtcatcacctctactacccacaagaccttgcggggacctcggggaggcttaatcctagccaaggcaaaatatgctaaaaaattaaactcggctatttttcccggtagccagggcggtcccttggaacacgtgattgctgggaaggcagtggcctttttagaagctgcccagcctgcctttaaagactatgctaagcagattaaaaagaatgccaaagctatggcagaggtttttgcccaatcagacaaggcccgactgatctcgaatggaacggacaaccacttgctcctccttgatgtaacaggttttggccttaccggtaaagaggccgagaagcttttagaccaggccaaaattaccgttaataaaaacaccattccttttgaaacccggtcaccacaagtgacgtctggtatccgcttagggacaccggctgtgaccactcggggcttcaaagaagaagattgccagcaagttgcccgtttgattatccaagcattggaatcaaatgaccaagaagaggtcctcgaccaagttcgtcaaggtgtagccaacttaaccaaggctatcccactatacaaataa

SEQ ID NO: 2578 - protein, 411 aa, Alloiococcus otitidis
MTKQYFDKEIFATIEKERQRQEDNIELIASENFVSEEVLQAQGSILTNKYAEGYPGKRYYGGCEFVDVIEQLAIDRVKDLFEADYANVQPHSGSQANNAVFQALLQPGDTYLGMDLSHGGHLTHGSPVNFSGILYHAVHYGVNKETELIDYDQVRQLAIDHQPKMIIAGYSAYPRELDFKKFRDIADEVGAYLMVDMAHFAGLVAAGVYPDPVPYADVITSTTHKTLRGPRGGLILAKAKYAKKLNSAIFPGSQGGPLEHVIAGKAVAFLEAAQPAFKDYAKQIKKNAKAMAEVFAQSDKARLISNGTDNHLLLLDVTGFGLTGKEAEKLLDQAKITVNKNTIPFETRSPQVTSGIRLGTPAVTTRGFKEEDCQQVARLIIQALESNDQEEVLDQVRQGVANLTKAIPLYK

SEQ ID NO: 2579 - DNA, 555 bp, Alloiococcus otitidis
  CDS (88)..(552)
ccaagaagaggtcctcgaccaagttcgtcaaggtgtagccaacttaaccaaggctatcccactatacaaataagaaagaatgagttgatgaaagaaatacaagtaaaagaccaagaaggatcctataaactagcccagaccctagcccaatatgtcaagccggggatggtcttcttactagaaggggacttgggggccggcaagacaacttttaccaagggcttggcccaggccctccacattgaccggatgattaaaagtcccacctacacgattatccgagaataccaaggtggcgatctccctctctaccatatggacctctaccggctggacttggacatggccctagacctaggtttggaagaatattttgacggccctggtctttgtgtggtggagtggccttcccaggcaatggaggccatgcccagaaaacaccttaaaattactattaaggattactttgaccaagccggccaccggactttttacttgcaagctgagggagaagcctaccaagccctcctagaccaggttcatttagacgaatag

SEQ ID NO: 2580 - protein, 155 aa, Alloiococcus otitidis
MKEIQVKDQEGSYKLAQTLAQYVKPGMVFLLEGDLGAGKTTFTKGLAQALHIDRMIKSPTYTIIREYQGGDLPLYHMDLYRLDLDMALDLGLEEYFDGPGLCVVEWPSQAMEAMPRKHLKITIKDYFDQAGHRTFYLQAEGEAYQALLDQVHLDE

SEQ ID NO: 2581 - DNA, 555 bp, Alloiococcus otitidis; identical to SEQ ID NO: 2579
  CDS (85)..(552)

SEQ ID NO: 2582 - protein, 156 aa, Alloiococcus otitidis
MMKEIQVKDQEGSYKLAQTLAQYVKPGMVFLLEGDLGAGKTTFTKGLAQALHIDRMIKSPTYTIIREYQGGDLPLYHMDLYRLDLDMALDLGLEEYFDGPGLCVVEWPSQAMEAMPRKHLKITIKDYFDQAGHRTFYLQAEGEAYQALLDQVHLDE

SEQ ID NO: 2583 - DNA, 2691 bp, Alloiococcus otitidis
  CDS (853)..(2688)
cttttgcatgcgtctttttttaatcctgtctgtgctcttttaaaggagaaaggatcaactatgaccaaaccatattacgctatgaagcaagatgaggctttaagccatttggatgctagcttagagggcttatctgacaaccaagtccaggaccggctcgaccgatacggccccaaccaaatccaagaccaggagcaaaagtccacccttaaaatgttcctagaaaatttcaaagaccccatggtgatcatcctcttgctcgtggccctggtccaaattttcttgggtgagatttttgaatccctagttgtcctagccattgttatcctcagtgccattattacagtggttcaggagaaaaaagcagctgaatccctagagtccctccgcaacctgtcttctcccacagcagtagtttaccgcaatgaccagcaagttgaagttgaagcagaccaagttgtccccggtgatctggttcatttggaagttggcgatcaggtcccagcagacggcctcttgctagaagctaaaagtctgcaggtggacgaaggagccttaaccggagaatcagtccctgccagtaaggaagtcggccaagtagaagagaaaacacccctagctgaccgaattaacatggtctacagtggcaccctggtcaccaatggtcgaggaaaatttttagtaaccgaaaccggtaaccagtcggaaatgggtaaaattgcctctttgatccagtcagccaagaccaaggaaacccctctccaggtccaggttgggaaattttctgtgaagttgggctggggcatcttaatcctttctctctttatatttgccctttcaagttaccgaattttgaccatggggacttccaaccttaccctttccttagtcaatgcctttatgttcgctgtggcagtagctgttgctgcgattcctgaagctctccagtccatcattactattgttctctccacagggaccaacaaaatggctaaaagacatgccatcatccgccgcctaccagcagtggaaacactgggatcaacctctattatctgctcagacaagaccgggaccttgacccaaaacaagatgacggtagtggatggcttcctacctgaccaagaccaaatcttccaagatgaggatccagacaaatggtccccggcagaagacctcctctataaaatcgccatcttggcaaatgattcctatgtcaaccaggaagggactctagcaggtgatccaactgaagcagcctttattctcttggcccaagatttagacttagactatcaagacctccgcgaccgctatcctcgaatcgccgagctcccctttgactctgaccggaagttgatgtcctccctccatgaaattgacggagaccaaatgatgctaaccaaggggggacctgatgtcgttttcgaccgggccaaccgcattcttaaagacggccaggtccaagaccttagccaagaagataaagaagcctttatccaggctaatgaagactttgctgaagaagccaaacgagtcttggcctttgcctataaagaccacccttccgataacttagacctagatgatgaaaatgaccttatcctggtgggtttgatggctatgatcgacccaccccgacaagaggtttacgatgctatccaaactgccaaaaatgccggcatccggccaattatgatcaccggagaccacaagacaaccgcccaggccattgcccaggacttggaaatcttccgtgaaggtgatttggctgtcactggtagtgagttagatgacatgtccgaccgagaattggaagagaagttggaatccatttcagtctatgcccgggtcactcctgaaaacaaaatccggattgtcgatgcttggcaagccaaagacaaggttacggctatgactggggacggggttaacgatgcccctgcccttaaacaagctgacatcggtgtggccatggggtcaggaacggatgtcgcaaaagatgctgctgccatgatcttgaccgatgacaacttcgtctccattatcaatgcggttgaagttggccggaatgtctacagtaatattaaaaaatcgatttcctacctcttctccggaaaccttggggctgtcttggctattatcgtggccttgatcttaaattgggtggccccatttaccaccatccagcttctctttattaacctggtcaacgacgccctccctgctattgccctcggtgcggagccgattgaagcccaactgatgcaggaggacccaagagaccccaatgaaggtctctttgctggtggaaccctggaaaatatcctctttagggggattaccatagccctggccgttatcctgtcccagtatattggtttatcctacagcgttgaaatcagcgtggccatggccttcacaaccctcatcttatccagaagtctccaggttttcccagcccggtctaaaaacctgaccattgctgaattgggcttcacttccaacaaatacatcctccttgccttcctcgtctgcatggccttgtacggtttgaccctccttcctattgcccgggacctcttcagcattcccgactcctttggcctagtccactgggggatcgcttccggcctagccctagctaccaccatcatcatggaagtgaaaaaattaatctttaaccactaa

SEQ ID NO: 2584 - protein, 612 aa, Alloiococcus otitidis
MTMGTSNLTLSLVNAFMFAVAVAVAAIPEALQSIITIVLSTGTNKMAKRHAIIRRLPAVETLGSTSIICSDKTGTLTQNKMTVVDGFLPDQDQIFQDEDPDKWSPAEDLLYKIAILANDSYVNQEGTLAGDPTEAAFILLAQDLDLDYQDLRDRYPRIAELPFDSDRKLMSSLHEIDGDQMMLTKGGPDVVFDRANRILKDGQVQDLSQEDKEAFIQANEDFAEEAKRVLAFAYKDHPSDNLDLDDENDLILVGLMAMIDPPRQEVYDAIQTAKNAGIRPIMITGDHKTTAQAIAQDLEIFREGDLAVTGSELDDMSDRELEEKLESISVYARVTPENKIRIVDAWQAKDKVTAMTGDGVNDAPALKQADIGVAMGSGTDVAKDAAAMILTDDNFVSIINAVEVGRNVYSNIKKSISYLFSGNLGAVLAIIVALILNWVAPFTTIQLLFINLVNDALPAIALGAEPIEAQLMQEDPRDPNEGLFAGGTLENILFRGITIALAVILSQYIGLSYSVEISVAMAFTTLILSRSLQVFPARSKNLTIAELGFTSNKYILLAFLVCMALYGLTLLPIARDLFSIPDSFGLVHWGIASGLALATTIIMEVKKLIFNH

SEQ ID NO: 2585 - DNA, 2691 bp, Alloiococcus otitidis; identical to SEQ ID NO: 2583
  CDS (82)..(2688)

SEQ ID NO: 2586 - protein, 869 aa, Alloiococcus otitidis
MKQDEALSHLDASLEGLSDNQVQDRLDRYGPNQIQDQEQKSTLKMFLENFKDPMVIILLLVALVQIFLGEIFESLVVLAIVILSAIITVVQEKKAAESLESLRNLSSPTAVVYRNDQQVEVEADQVVPGDLVHLEVGDQVPADGLLLEAKSLQVDEGALTGESVPASKEVGQVEEKTPLADRINMVYSGTLVTNGRGKFLVTETGNQSEMGKIASLIQSAKTKETPLQVQVGKFSVKLGWGILILSLFIFALSSYRILTMGTSNLTLSLVNAFMFAVAVAVAAIPEALQSIITIVLSTGTNKMAKRHAIIRRLPAVETLGSTSIICSDKTGTLTQNKMTVVDGFLPDQDQIFQDEDPDKWSPAEDLLYKIAILANDSYVNQEGTLAGDPTEAAFILLAQDLDLDYQDLRDRYPRIAELPFDSDRKLMSSLHEIDGDQMMLTKGGPDVVFDRANRILKDGQVQDLSQEDKEAFIQANEDFAEEAKRVLAFAYKDHPSDNLDLDDENDLILVGLMAMIDPPRQEVYDAIQTAKNAGIRPIMITGDHKTTAQAIAQDLEIFREGDLAVTGSELDDMSDRELEEKLESISVYARVTPENKIRIVDAWQAKDKVTAMTGDGVNDAPALKQADIGVAMGSGTDVAKDAAAMILTDDNFVSIINAVEVGRNVYSNIKKSISYLFSGNLGAVLAIIVALILNWVAPFTTIQLLFINLVNDALPAIALGAEPIEAQLMQEDPRDPNEGLFAGGTLENILFRGITIALAVILSQYIGLSYSVEISVAMAFTTLILSRSLQVFPARSKNLTIAELGFTSNKYILLAFLVCMALYGLTLLPIARDLFSIPDSFGLVHWGIASGLALATTIIMEVKKLIFNH

SEQ ID NO: 2587 - DNA, 2691 bp, Alloiococcus otitidis; identical to SEQ ID NO: 2583
  CDS (61)..(2688)

SEQ ID NO: 2588 - protein, 876 aa, Alloiococcus otitidis
MTKPYYAMKQDEALSHLDASLEGLSDNQVQDRLDRYGPNQIQDQEQKSTLKMFLENFKDPMVIILLLVALVQIFLGEIFESLVVLAIVILSAIITVVQEKKAAESLESLRNLSSPTAVVYRNDQQVEVEADQVVPGDLVHLEVGDQVPADGLLLEAKSLQVDEGALTGESVPASKEVGQVEEKTPLADRINMVYSGTLVTNGRGKFLVTETGNQSEMGKIASLIQSAKTKETPLQVQVGKFSVKLGWGILILSLFIFALSSYRILTMGTSNLTLSLVNAFMFAVAVAVAAIPEALQSIITIVLSTGTNKMAKRHAIIRRLPAVETLGSTSIICSDKTGTLTQNKMTVVDGFLPDQDQIFQDEDPDKWSPAEDLLYKIAILANDSYVNQEGTLAGDPTEAAFILLAQDLDLDYQDLRDRYPRIAELPFDSDRKLMSSLHEIDGDQMMLTKGGPDVVFDRANRILKDGQVQDLSQEDKEAFIQANEDFAEEAKRVLAFAYKDHPSDNLDLDDENDLILVGLMAMIDPPRQEVYDAIQTAKNAGIRPIMITGDHKTTAQAIAQDLEIFREGDLAVTGSELDDMSDRELEEKLESISVYARVTPENKIRIVDAWQAKDKVTAMTGDGVNDAPALKQADIGVAMGSGTDVAKDAAAMILTDDNFVSIINAVEVGRNVYSNIKKSISYLFSGNLGAVLAIIVALILNWVAPFTTIQLLFINLVNDALPAIALGAEPIEAQLMQEDPRDPNEGLFAGGTLENILFRGITIALAVILSQYIGLSYSVEISVAMAFTTLILSRSLQVFPARSKNLTIAELGFTSNKYILLAFLVCMALYGLTLLPIARDLFSIPDSFGLVHWGIASGLALATTIIMEVKKLIFNH

SEQ ID NO: 2589 - DNA, 2691 bp, Alloiococcus otitidis; identical to SEQ ID NO: 2583
  CDS (4)..(2688)

SEQ ID NO: 2590 - protein, 895 aa, Alloiococcus otitidis
MHASFFNPVCALLKEKGSTMTKPYYAMKQDEALSHLDASLEGLSDNQVQDRLDRYGPNQIQDQEQKSTLKMFLENFKDPMVIILLLVALVQIFLGEIFESLVVLAIVILSAIITVVQEKKAAESLESLRNLSSPTAVVYRNDQQVEVEADQVVPGDLVHLEVGDQVPADGLLLEAKSLQVDEGALTGESVPASKEVGQVEEKTPLADRINMVYSGTLVTNGRGKFLVTETGNQSEMGKIASLIQSAKTKETPLQVQVGKFSVKLGWGILILSLFIFALSSYRILTMGTSNLTLSLVNAFMFAVAVAVAAIPEALQSIITIVLSTGTNKMAKRHAIIRRLPAVETLGSTSIICSDKTGTLTQNKMTVVDGFLPDQDQIFQDEDPDKWSPAEDLLYKIAILANDSYVNQEGTLAGDPTEAAFILLAQDLDLDYQDLRDRYPRIAELPFDSDRKLMSSLHEIDGDQMMLTKGGPDVVFDRANRILKDGQVQDLSQEDKEAFIQANEDFAEEAKRVLAFAYKDHPSDNLDLDDENDLILVGLMAMIDPPRQEVYDAIQTAKNAGIRPIMITGDHKTTAQAIAQDLEIFREGDLAVTGSELDDMSDRELEEKLESISVYARVTPENKIRIVDAWQAKDKVTAMTGDGVNDAPALKQADIGVAMGSGTDVAKDAAAMILTDDNFVSIINAVEVGRNVYSNIKKSISYLFSGNLGAVLAIIVALILNWVAPFTTIQLLFINLVNDALPAIALGAEPIEAQLMQEDPRDPNEGLFAGGTLENILFRGITIALAVILSQYIGLSYSVEISVAMAFTTLILSRSLQVFPARSKNLTIAELGFTSNKYILLAFLVCMALYGLTLLPIARDLFSIPDSFGLVHWGIASGLALATTIIMEVKKLIFNH

SEQ ID NO: 2591 - DNA, 285 bp, Alloiococcus otitidis
  CDS (40)..(282)
gataaaccaatatactgggacaggataacggccagggctatggtaatccccctaaagaggatattttccagggttccaccagcaaagagaccttcattggggtctcttgggtcctcctgcatcagttgggcttcaatcggctccgcaccgagggcaatagcagggagggcgtcgttgaccaggttaataaagagaagctggatggtggtaaatggggccacccaatttaagatcaaggccacgataatagccaagacagccccaaggtttccggagaagaggtag

SEQ ID NO: 2592 - protein, 81 aa, Alloiococcus otitidis
MVIPLKRIFSRVPPAKRPSLGSLGSSCISWASIGSAPRAIAGRASLTRLIKRSWMVVNGATQFKIKATIIAKTAPRFPEKR

SEQ ID NO: 2593 - DNA, 930 bp, Alloiococcus otitidis
  CDS (13)..(927)
aggattagtaaaatgttatttgatcgtatcgtagaagcctttcccgaaagcaacatcaaaaaagatgaacccttgtcctattactcttacactcgaacaggtggcccggctgacattttgattttcccagaatccatcgatgaaattgtgacgattatcaagtggatcaaccaaagtccggaataccaagctggcgatctccccctcactatcttaggcaatgctagcaacctgatcgtaaaagatggtgggataagagggattaccatcattaccaccggcattaaaaccatttgtcacgaagagaaccggatcactgcgggcgctggagcagctattatcgatgttagccaggctgccttggaccatagcttaactggcttggaattcgcttgtggcataccgggtagtacaggcggggctgtttacatgaacgctggggcttacggtggggaagtccagcattgtgttgaaagtgtccaagtcttgacccggcatggccagttgaagacctatagtaatgcggaaatgaacttctcctaccgccacagttatttgatggaagaagacgatatagtagtctccgtgacctttaaattggagtcgggcgactacatcactatcaaggaaaagatggatgaattaacctaccttagagaatccaaacaaccgctggaatacccctcttgtgggtcagtctttaaaagacctgaaggccactttacggggaaattaatccaggatgctggccttcaaggattggtccatggtggagcccaggtatccgaaaaacatgccggttttatcattaatataggcaatgctaccgccagcgactaccaagagttgatccaacatatccaagaagaagtctaccggatttacaaggttaagctggaacgtgaagttcgcattataggggaggattag

SEQ ID NO: 2594 - protein, 305 aa, Alloiococcus otitidis
MLFDRIVEAFPESNIKKDEPLSYYSYTRTGGPADILIFPESIDEIVTIIKWINQSPEYQAGDLPLTILGNASNLIVKDGGIRGITIITTGIKTICHEENRITAGAGAAIIDVSQAALDHSLTGLEFACGIPGSTGGAVYMNAGAYGGEVQHCVESVQVLTRHGQLKTYSNAEMNFSYRHSYLMEEDDIVVSVTFKLESGDYITIKEKMDELTYLRESKQPLEYPSCGSVFKRPEGHFTGKLIQDAGLQGLVHGGAQVSEKHAGFIINIGNATASDYQELIQHIQEEVYRIYKVKLEREVRIIGED

SEQ ID NO: 2595 - DNA, 690 bp, Alloiococcus otitidis
  CDS (16)..(687)
aaaggggcaggcgtcatgacagacttaaagaaagcagttggctatcaggcggccgaatacgttgaagatggtatggtggttggtcttggcacaggctcgacagtagcctacctactcgagggtttgggcaagcggctgaaggcagaaaacttgtccataacagctgtcacaacttccaaccggaccaaggacaaggcgaggagcttgggcattcccacccttcccctggaccaggttgagcgaattgatttgaccattgacggagctgatgaggtggacccccaatttaacgggatcaaggggggaggcggggcccacctttacgaaaaaattgtggcccagcattccaaacaaaatatctggattgtcgatgaatccaagttggtggaccagctaggggccttcccattgcctgttgaggtggtcaaatttggtagccagcacctatttgaccaattggtggcagaccagctcaagcctagctggcgtttagatgaccagggccaaaagtacttaaccgatgacaacaactacatcatcgacctcaagcttgactacattgaccaggtccaagaattggcagcccaactcaaatcctatactggtctggtggagcacggtctttttatcggcttgaccgaccgagtcctagtgggccgaccaagtggggtagaagttttaaccaagtag

SEQ ID NO: 2596 - protein, 224 aa, Alloiococcus otitidis
MTDLKKAVGYQAAEYVEDGMVVGLGTGSTVAYLLEGLGKRLKAENLSITAVTTSNRTKDKARSLGIPTLPLDQVERIDLTIDGADEVDPQFNGIKGGGGAHLYEKIVAQHSKQNIWIVDESKLVDQLGAFPLPVEVVKFGSQHLFDQLVADQLKPSWRLDDQGQKYLTDDNNYIIDLKLDYIDQVQELAAQLKSYTGLVEHGLFIGLTDRVLVGRPSGVEVLTK

SEQ ID NO: 2597 - DNA, 681 bp, Alloiococcus otitidis
  CDS (37)..(678)
atgtttaaaaaagttctcaagccggcctttccggtcatggtttcctaccttgttctttccctggtttgcgggattgtctcctttcaggttggctttacccccctgcagattttacttacttccgcggtcttgtattccggttcaggtcagtttcttttagccggtctctacggggctggagctagcctggtgtctattatcattaccctggccttcttaggcctccgctttgtcctgatgtccatgtcttcctcccgccatgtccgccaaaagactacttggttcgactttttctttagcatgaccatctcagatgaaagctttggtgtgaacacagtcatgtttagtcaacctgactggacagcagaccatgccttggctttgaacttattgaactacggcatttgggttctaggatccggactaggagccctcttggtcagcgtggttgacttggacacctctattattagttatggtctaacggccatgtttatctgcatgacagttgagcagtttgtagaccgttactacttatatgctggcttgatttctgtagtttttaccattattgccctcgttatcttgcaaaactccctgggcatagtggtgggggccttgctagcatccttaatcggctttcaattaaaatggaccaaggagggacaaggccatgaataa

SEQ ID NO: 2598 - protein, 214 aa, Alloiococcus otitidis
MVSYLVLSLVCGIVSFQVGFTPLQILLTSAVLYSGSGQFLLAGLYGAGASLVSIIITLAFLGLRFVLMSMSSSRHVRQKTTWFDFFFSMTISDESFGVNTVMFSQPDWTADHALALNLLNYGIWVLGSGLGALLVSVVDLDTSIISYGLTAMFICMTVEQFVDRYYLYAGLISVVFTIIALVILQNSLGIVVGALLASLIGFQLKWTKEGQGHE

SEQ ID NO: 2599 - DNA, 681 bp, Alloiococcus otitidis; identical to SEQ ID NO: 2597
  CDS (1)..(678)

SEQ ID NO: 2600 - protein, 226 aa, Alloiococcus otitidis
MFKKVLKPAFPVMVSYLVLSLVCGIVSFQVGFTPLQILLTSAVLYSGSGQFLLAGLYGAGASLVSIIITLAFLGLRFVLMSMSSSRHVRQKTTWFDFFFSMTISDESFGVNTVMFSQPDWTADHALALNLLNYGIWVLGSGLGALLVSVVDLDTSIISYGLTAMFICMTVEQFVDRYYLYAGLISVVFTIIALVILQNSLGIVVGALLASLIGFQLKWTKEGQGHE

SEQ ID NO: 2601 - DNA, 348 bp, Alloiococcus otitidis
  CDS (94)..(345)
aatggaccaaggagggacaaggccatgaataatgattttcctattcttttagcggctttcgcagccatcaccctgtcaaccaagttcctgcccatggtctggttgaaaaataaaaatctctctcctaaattcaaggcttggatgaactttatcccggtaactatttttgccgccctagtcgcctccgatgttttctttgtagaagaccaagtctccttccacctcttggaaaaccccctccttatcccctcccttattgtcctcttggtatcagtgaagactaaaaacctgatttatgccatcttgactggggtgggctctctctttctcttccaagttcttctttaa

SEQ ID NO: 2602 - protein, 84 aa, Alloiococcus otitidis
MVWLKNKNLSPKFKAWMNFIPVTIFAALVASDVFFVEDQVSFHLLENPLLIPSLIVLLVSVKTKNLIYAILTGVGSLFLFQVLL

SEQ ID NO: 2603 - DNA, 348 bp, Alloiococcus otitidis; identical to SEQ ID NO: 2601
  CDS (25)..(345)

SEQ ID NO: 2604 - protein, 107 aa, Alloiococcus otitidis
MNNDFPILLAAFAAITLSTKFLPMVWLKNKNLSPKFKAWMNFIPVTIFAALVASDVFFVEDQVSFHLLENPLLIPSLIVLLVSVKTKNLIYAILTGVGSLFLFQVLL

SEQ ID NO: 2605 - DNA, 1629 bp, Alloiococcus otitidis
  CDS (262)..(1626)
aaaggtgttttccactataataatggtagtctagcccagtcaggaggaactttattggtctttaaagtaaaaaatagcttggtctttgtattggttttaatcttaatcttttcaacctcaatcgcaacttatattcaatttgtcaagggcgacctcttccaatttgctatagagcgaaatgtcaatggtttagttggaactggtctgtttttgacgacccttattatttttgagcttgtcttttactacttggaatggaagatgcataactacatttattccaatgttttaattgatattaagagtagtttgtctaggcaatttctccaaaaaaatagttttgaccatttaattgctgaaaaagaagctacgatcaacaccctatccaataagattgaccgactggaagtcaattattatcgggctatttttaataatatctacctgctacttagaatggtctttgttacctttgctttgatgtacattaacctttatatcggacttggcctcttggtcttcttatttcttcccttgttggtcacccgcttttacaagaataaactttcggtaacagagggaaaataccaactttataaagggcgcaacctggacctctatgaaaattactttagcaatatgcggtcagttaagagtttccatttacaggagaccatctttaaccgcttaagccaatccattatcggagaggttttaacttataaaagaaaccagaatacaaaaatcaatgccaatatactgaattcttctttatcctacttttcccacttactgatcttgatcttttcgactatcctagttctgaacggtcaaatccaagcaggtactgttttaactctgattggcttggtagagcaactaagtatgcctatcctggtcttttcacaaaatttaaataatattaacagtaccaaggaaattcgcaaggaaatagaagcagacttaaatcaagttggttcgaaaaatgacaaaagctacaccatccaagacaagcttgaatctgacggcatctcggttaactttggtaagacttgtttaagttatgataatttaaccttccataaagataaaaattatttaatccaaggaccgagtggaactgggaaaagtctctatatggatatcctcctaaaaaataggaaggaataccaaggggatatttatattgaccaggaagtttcagataaggctggggcaattgataatattgcctatatcggtccctccaataacttgtttaagggcagtgtcttctttaatatcgcatttggacgagacttaagtgaccaggaaatggttaccatcaaaagtcttctaggacctgatcttataaaatccacctccatcgatgacctgtccagtggtgaaaaacgaagagtcctgctcctccgaggtattcttagcactcgcaatcttgtcttctttgacgaaccgactagtaatctagaccgggaaaatgtctataagttctgggaaatagtgagtcaagtaacagataaacattacatcgtgatttcccatgaccatccaagtaaatataactacctattcgatgacatcatcgacttcactgggcttgttcatagaagtaaggggaaacatgactaa

SEQ ID NO: 2606 - protein, 455 aa, Alloiococcus otitidis
MHNYIYSNVLIDIKSSLSRQFLQKNSFDHLIAEKEATINTLSNKIDRLEVNYYRAIFNNIYLLLRMVFVTFALMYINLYIGLGLLVFLFLPLLVTRFYKNKLSVTEGKYQLYKGRNLDLYENYFSNMRSVKSFHLQETIFNRLSQSIIGEVLTYKRNQNTKINANILNSSLSYFSHLLILIFSTILVLNGQIQAGTVLTLIGLVEQLSMPILVFSQNLNNINSTKEIRKEIEADLNQVGSKNDKSYTIQDKLESDGISVNFGKTCLSYDNLTFHKDKNYLIQGPSGTGKSLYMDILLKNRKEYQGDIYIDQEVSDKAGAIDNIAYIGPSNNLFKGSVFFNIAFGRDLSDQEMVTIKSLLGPDLIKSTSIDDLSSGEKRRVLLLRGILSTRNLVFFDEPTSNLDRENVYKFWEIVSQVTDKHYIVISHDHPSKYNYLFDDIIDFTGLVHRSKGKHD

SEQ ID NO: 2607 - DNA, 1629 bp, Alloiococcus otitidis; identical to SEQ ID NO: 2605
  CDS (55)..(1626)

SEQ ID NO: 2608 - protein, 524 aa, Alloiococcus otitidis
MVFKVKNSLVFVLVLILIFSTSIATYIQFVKGDLFQFAIERNVNGLVGTGLFLTTLIIFELVFYYLEWKMHNYIYSNVLIDIKSSLSRQFLQKNSFDHLIAEKEATINTLSNKIDRLEVNYYRAIFNNIYLLLRMVFVTFALMYINLYIGLGLLVFLFLPLLVTRFYKNKLSVTEGKYQLYKGRNLDLYENYFSNMRSVKSFHLQETIFNRLSQSIIGEVLTYKRNQNTKINANILNSSLSYFSHLLILIFSTILVLNGQIQAGTVLTLIGLVEQLSMPILVFSQNLNNINSTKEIRKEIEADLNQVGSKNDKSYTIQDKLESDGISVNFGKTCLSYDNLTFHKDKNYLIQGPSGTGKSLYMDILLKNRKEYQGDIYIDQEVSDKAGAIDNIAYIGPSNNLFKGSVFFNIAFGRDLSDQEMVTIKSLLGPDLIKSTSIDDLSSGEKRRVLLLRGILSTRNLVFFDEPTSNLDRENVYKFWEIVSQVTDKHYIVISHDHPSKYNYLFDDIIDFTGLVHRSKGKHD

SEQ ID NO: 2609 - DNA, 873 bp, Alloiococcus otitidis
  CDS (22)..(870)
acattatttacggaggaatatatgatatattataatattgaattaataagaataaaaaaaggcttgaagattaatgaattaatcgatggtattatgtcaagggcaacttatcacaactttaaaacaggaaaacatgagattagttacttagacttttttaagctagttaaaagattaaatttaatgcctgatgaattaggagaagtggttgttgatgagactacgaacatgttcaaaaaatacatgaatcagttgaaagacttgtctgaccaaggggaggtcaatagcttattggctttaaaaagggaaatgaaccaaaatagaaatgggcttcccaataaagacctgcttgtagaattagtggatagccatatccaccagttacaagggcagacttttgatttaaatcccggttctttggtttctcaatacttgtttggagctgaggggtggactcagtatgagaaaatcatttttaatcttagtttgcctttcctccgaagtgaattgattgatatctacttagataggattttatcaactaaaatggatgatcaagatcataggcactacggtgatggccattttagactggttatccgagccttgatcatttttattgaaggcaaggactatggaatgatcaagaaatggtcgaagaaggttgaagaaatgccattagatccttcatttgtatttgagataagcttaaaaaagctattccatttattggtggactatattctagaccatcatttgtctagccttgataaaagtaagcgaatggttaaactattagaagaattggattgtcagccctacgccgacaacttgactaatataattacttttgttgaagaccattatgcctag

SEQ ID NO: 2610 - protein, 283 aa, Alloiococcus otitidis
MIYYNIELIRIKKGLKINELIDGIMSRATYHNFKTGKHEISYLDFFKLVKRLNLMPDELGEVVVDETTNMFKKYMNQLKDLSDQGEVNSLLALKREMNQNRNGLPNKDLLVELVDSHIHQLQGQTFDLNPGSLVSQYLFGAEGWTQYEKIIFNLSLPFLRSELIDIYLDRILSTKMDDQDHRHYGDGHFRLVIRALIIFIEGKDYGMIKKWSKKVEEMPLDPSFVFEISLKKLFHLLVDYILDHHLSSLDKSKRMVKLLEELDCQPYADNLTNIITFVEDHYA

SEQ ID NO: 2611 - DNA, 351 bp, Alloiococcus otitidis
  CDS (61)..(348)
aagtctgcttccttaaataagactttttcaccaacttggatagttaccttctcccccataatgggaaagcggttgtggatggccaaatttttggcctcaggaaagctaatttccttgtcctcttctaccttttcgacttcctctaattggtcagcccttttttgcatggacttggctgatttaaaggctgctgcttggacagtatctttctgtttagaagaagccaagcggttgggtttgatggccttattcttttgcttttggctcacattttccattttttgggcttggtcttgtttttcctgggcagcttcctctagacgccttttttctttgataaagttttcataa

SEQ ID NO: 2612 - protein, 96 aa, Alloiococcus otitidis
MGKRLWMAKFLASGKLISLSSSTFSTSSNWSALFCMDLADLKAAAWTVSFCLEEAKRLGLMALFFCFWLTFSIFWAWSCFSWAASSRRLFSLIKFS

SEQ ID NO: 2613 - DNA, 1473 bp, Alloiococcus otitidis
  CDS (4)..(1470)
actatggataagttagttttagacttgcatgatattgaaaagagtttcatgcaccaagatattttaagtattgacagtttgaaggtttatgaaagtgaacgaattggagtcgttggtagcaatggggcgggcaagtccaccctcttaaatataattgcaggtaagctaaaaccagacagtggccaggtcacccgcaatatagattttgaatattacgagcagattgaaagccttgacccagactatgaaagaattgaccctgaatacctttctcgcttggagcttccggattatgaagccagtaattttagtgggggtgaagggactcgtttacggttggcggaatttttctcgacttaccactttggtttgttgttagatgagccgaccacccacttagatagtcaaggcattcaatttttaatcgaccaattaaagtactattatggtaccctaattgtggtcagccacgaccggtattttttagatgaggtcgtagacactatctgggaagtcagcgatggccgtgtaaccgtctatcccggcaactactcagactaccgagacctgaaggaagaagaattgatcgagcaagaacataattatgaaaactttatcaaagaaaaaaggcgtctagaggaagctgcccaggaaaaacaagaccaagcccaaaaaatggaaaatgtgagccaaaagcaaaagaataaggccatcaaacccaaccgcttggcttcttctaaacagaaagatactgtccaagcagcagcctttaaatcagccaagtccatgcaaaaaagggctgaccaattagaggaagtcgaaaaggtagaagaggacaaggaaattagctttcctgaggccaaaaatttggccatccacaaccgctttcccattatgggggagaaggtaactatccaagttggtgaaaaagtcttatttaaggaagcagactttcaactgcccctagggaagtgcattgggattgcagggccaaatggttccggtaagtctaccttgttggactatattgtaaaagatgggccgggaattaccctgtctagtaaaattgttttttctatttataaccagcacgattaccagttaaaagacaaaaaaaccatgttggaattcctagaagaggattcctatatcgatgaggccttaatccgaaccattttgaataatctgggttttgaccaaactgaaatcaccaagaaattggtctgcaatttaagtggtggggaaagaacccggttagtgattgccaaattatttaccgacccaagcaatgtcttggtactggacgaaccaaccaattttattgacctggccactattgaggcccttgagtcactcattgctagctaccaggggacagtcttagtaacctcccatgataaatacttcctagaaaaggtagctgaccaaatttggcaggtccaagaccaaaaattgaagttagttaaatattaa

SEQ ID NO: 2614 - protein, 489 aa, Alloiococcus otitidis
MDKLVLDLHDIEKSFMHQDILSIDSLKVYESERIGVVGSNGAGKSTLLNIIAGKLKPDSGQVTRNIDFEYYEQIESLDPDYERIDPEYLSRLELPDYEASNFSGGEGTRLRLAEFFSTYHFGLLLDEPTTHLDSQGIQFLIDQLKYYYGTLIVVSHDRYFLDEVVDTIWEVSDGRVTVYPGNYSDYRDLKEEELIEQEHNYENFIKEKRRLEEAAQEKQDQAQKMENVSQKQKNKAIKPNRLASSKQKDTVQAAAFKSAKSMQKRADQLEEVEKVEEDKEISFPEAKNLAIHNRFPIMGEKVTIQVGEKVLFKEADFQLPLGKCIGIAGPNGSGKSTLLDYIVKDGPGITLSSKIVFSIYNQHDYQLKDKKTMLEFLEEDSYIDEALIRTILNNLGFDQTEITKKLVCNLSGGERTRLVIAKLFTDPSNVLVLDEPTNFIDLATIEALESLIASYQGTVLVTSHDKYFLEKVADQIWQVQDQKLKLVKY

SEQ ID NO: 2615 - DNA, 1089 bp, Alloiococcus otitidis
  CDS (205)..(1086)
aaaatggtgcttgctatgactaagtcaaacaaccgaaaaaacgaacatgtttccctagctcaaaagttttatagtaaaaaagagagccccttaaaggatgtccagcttgttcaccactccctgccccagactgatcttgaccaagtggatttggctgtctcatttgccggtctcaacttcaaggcccccttttttatcaatgccatgactggggggtctcagtggagtcagaccatcaatgagaaattagccatcattgcccgggaaagccagctggccatggccaccgggtcagtttcagccgccttaaaagaccccagtttggccccttcctaccaggtggtccgtcagatcaatcctcataatattatcctagccaacctaggggccaaccatggcttggaaaatgccaaacgagcggtggacctcctccaggctgatgccttgcaagtccacctcaatgccccccaagaaattgtcatgccagaaggtgaccggacttttagtcaatggttggacaatatccaagccatctgttccggactagacctgcctgttattgtcaaggaagttggctttggcatgtccaaggaaaccgtccagactttggaagaagctggtgtgacttacattgacgtgtcaggctctggaggaaccaattttgcccaaattgaaaactaccggcggaaggaaaacaagttagatgactttgaaggcatcggccagaccactgccatttcgctattagaagccatggaggcccggcaaaaaagtcagatcattgcctccggtggcatccggaccccgcttgatattgtcaagtccctagccttgggggcagacctggtagggatttctaaccaaatcctccacctggccatcaaagacgtcaataaagccatagaaactattgaccagtggaaggaagaattgaagaaatggtataccatcctgggagccaaaaagtctgccgacctccaggtgaagacagacctggtgattaccggccaaaccgctgcctggtgccaggcccggcagattgatctaaccctttatgccaagcgacgggccaagtcccaaacacggtga

SEQ ID NO: 2616 - protein, 294 aa, Alloiococcus otitidis
MTGGSQWSQTINEKLAIIARESQLAMATGSVSAALKDPSLAPSYQVVRQINPHNIILANLGANHGLENAKRAVDLLQADALQVHLNAPQEIVMPEGDRTFSQWLDNIQAICSGLDLPVIVKEVGFGMSKETVQTLEEAGVTYIDVSGSGGTNFAQIENYRRKENKLDDFEGIGQTTAISLLEAMEARQKSQIIASGGIRTPLDIVKSLALGADLVGISNQILHLAIKDVNKAIETIDQWKEELKKWYTILGAKKSADLQVKTDLVITGQTAAWCQARQIDLTLYAKRRAKSQTR

SEQ ID NO: 2617 - DNA, 1089 bp, Alloiococcus otitidis; identical to SEQ ID NO: 2615
  CDS (4)..(1086)

SEQ ID NO: 2618 - protein, 361 aa, Alloiococcus otitidis
MVLAMTKSNNRKNEHVSLAQKFYSKKESPLKDVQLVHHSLPQTDLDQVDLAVSFAGLNFKAPFFINAMTGGSQWSQTINEKLAIIARESQLAMATGSVSAALKDPSLAPSYQVVRQINPHNIILANLGANHGLENAKRAVDLLQADALQVHLNAPQEIVMPEGDRTFSQWLDNIQAICSGLDLPVIVKEVGFGMSKETVQTLEEAGVTYIDVSGSGGTNFAQIENYRRKENKLDDFEGIGQTTAISLLEAMEARQKSQIIASGGIRTPLDIVKSLALGADLVGISNQILHLAIKDVNKAIETIDQWKEELKKWYTILGAKKSADLQVKTDLVITGQTAAWCQARQIDLTLYAKRRAKSQTR

SEQ ID NO: 2619 - DNA, 1104 bp, Alloiococcus otitidis
  CDS (16)..(1101)
aaagctggtgttttcatggtttatagcttaaggattccggggaaactttatttggcaggtgaatacgcagtagtaacccccggctatgccgggatcttgctgacagtcagccggtatttgactttagacatttgggaaacatctcccgaccaagcttcagtcaggtctcaaacatatggcaaccaggcctatgcttgggagcggttagatggtatctttagctttaaggactggtcccaccccttccacctagtcgaaacggtgatccaaacagtggaagcctacatagaatccttgtccctgcctttaaaaagttacgggattcagatcaagagccagttggactaccagggcaaaaaaattggcctggggtctagtggggccgttaccatcgctgttatccgaggcctgagccttctttacgacctccacttaaaagacatagacattttcaaactagctgccatcgcccatatccagctaaagagcaaggggtcttttggcgatttggcagcctgcacttatactggtgtgatccgctaccagtccctggatagagaatggttacaagaacaaatctccaaccattccatcaaggacctcctggccatggattggcctagcctaggtctagaccggctcagcctgccccatgacctcaggcttttaatcggatggaccggccagcctgcctccacagaaaaattggttcaggctgtctacccccaaaaaataaccaggacccccttggacttccagtccttcttagaccaatcccaagagtgtgtcgacggcttggtggagtctttaagccaggctgactcccaggcaagcttagcttggatccaaaagaaccgaaccctcctcaaggcaatgggccaaagccgggggaaagtcatcgaaaccaaagccttgacctacttgtgcgatattgtcgcgaaatacggaggccaagccaagtcttccggtgccggcggtggagattgtggcattggcctaatcacaagggagagcccaatagaagccatctaccgggaatggatggatgcaggtatcttgcccttaagactagacattgtagaaaatggtgcttgctatgactaa

SEQ ID NO: 2620 - protein, 362 aa, Alloiococcus otitidis
MVYSLRIPGKLYLAGEYAVVTPGYAGILLTVSRYLTLDIWETSPDQASVRSQTYGNQAYAWERLDGIFSFKDWSHPFHLVETVIQTVEAYIESLSLPLKSYGIQIKSQLDYQGKKIGLGSSGAVTIAVIRGLSLLYDLHLKDIDIFKLAAIAHIQLKSKGSFGDLAACTYTGVIRYQSLDREWLQEQISNHSIKDLLAMDWPSLGLDRLSLPHDLRLLIGWTGQPASTEKLVQAVYPQKITRTPLDFQSFLDQSQECVDGLVESLSQADSQASLAWIQKNRTLLKAMGQSRGKVIETKALTYLCDIVAKYGGQAKSSGAGGGDCGIGLITRESPIEAIYREWMDAGILPLRLDIVENGACYD

SEQ ID NO: 2621 - DNA, 1023 bp, Alloiococcus otitidis
  CDS (271)..(1020)
gagaagccaaccatgactaagcaggcctttgaaaagaaaaagttaggccggatttgccgggcccataccaacattgccttgatcaagtactggggtaaggctgatagggacttgattatccccaataacaactccctatctttaaccttggacgctttttataccgatacccaggtagtttttgacccagacttggaccaggaccaattatggctagacgggaaacaggaaaaagggtccgccttaaccaaggcccaggtcatcctggacttggttcgggaccaagcccagcttgactggccggccaaaattaccagccacaaccaagttgccactgcagctggcttggcttcctctgcttctggtctggccgccttggcgggtgcttcagctgatgctttagaccttggcctatccccaactgacctctcccgattggcccgcaggggatctgggtctgcctcacgaagtatttttggtggttttgtcgagtgggaaaagggtcatgatgatagctcttcctttgccaagcccatcgacttggcccagtgggatattgccatgctctttgtcattgtaagcgaccgaccaaaggcaatttcctccagccaaggcatgcaattgacccaggagacgtcggacttttaccaggcctggttagacagcctggaccaagacctagcagacatcaagtccgctatccaagcccaagacctcgaccaggttgggtccattgcagaaagaaatgccctgaaaatgcatgccaccaacctggcagccaagccccccttcacctattggactaaagaaagtttagccctgatgcaggaagtatgggaccggcgcaaggctggccagtccctctacttcaccatggacgccggccccaatgtcaaggttattggcagggaagctgaccttaaagccttcaaagcagacctcagccaagactggcccgacaagcatcttgtcttagctaaaccgggtccaggcctggcctttattgatggacctttgaactag

SEQ ID NO: 2622 - protein, 250 aa, Alloiococcus otitidis
MVRDQAQLDWPAKITSHNQVATAAGLASSASGLAALAGASADALDLGLSPTDLSRLARRGSGSASRSIFGGFVEWEKGHDDSSSFAKPIDLAQWDIAMLFVIVSDRPKAISSSQGMQLTQETSDFYQAWLDSLDQDLADIKSAIQAQDLDQVGSIAERNALKMHATNLAAKPPFTYWTKESLALMQEVWDRRKAGQSLYFTMDAGPNVKVIGREADLKAFKADLSQDWPDKHLVLAKPGPGLAFIDGPLN

SEQ ID NO: 2623 - DNA, 1023 bp, Alloiococcus otitidis; identical to SEQ ID NO: 2621
  CDS (13)..(1020)

SEQ ID NO: 2624 - protein, 336 aa, Alloiococcus otitidis
MTKQAFEKKKLGRICRAHTNIALIKYWGKADRDLIIPNNNSLSLTLDAFYTDTQVVFDPDLDQDQLWLDGKQEKGSALTKAQVILDLVRDQAQLDWPAKITSHNQVATAAGLASSASGLAALAGASADALDLGLSPTDLSRLARRGSGSASRSIFGGFVEWEKGHDDSSSFAKPIDLAQWDIAMLFVIVSDRPKAISSSQGMQLTQETSDFYQAWLDSLDQDLADIKSAIQAQDLDQVGSIAERNALKMHATNLAAKPPFTYWTKESLALMQEVWDRRKAGQSLYFTMDAGPNVKVIGREADLKAFKADLSQDWPDKHLVLAKPGPGLAFIDGPLN

SEQ ID NO: 2625 - DNA, 981 bp, Alloiococcus otitidis
  CDS (28)..(978)
acaaaaatagacaaaggagacaaaaggatgacgcttgttaaaaatgtagccaaaggcactgcccatggtaaaattattttaatcggtgagcatgctgttgtctataacatgccggccatcgccctcccttttaccacagccaccatcaccgttgaagttagtccttaccaaggcaaaagctatctagaaagtgcttgctactgcggatctttagaccaagcgcccggggacttggcagggcttcaagcctgtttgacagcggtttgtgccgacttagaccagtccagcgaccacttgtatatcaaggtcgacagcatgatccctgctgaaagaggaatggggtccagtgctgctgtggccaccgccttagtcaaggccctctttcactacttccaagtcgacttaagcagtgaagccctctcagcctatgtcgagattgccgaaaaaattacccatggcaagccatcgggtctggatgctacagtcgtcaactccattgcccccgtttattttaaacgcaaccagcttcccaaggccatccctttaaatgttgacggctatttaattgcagccgatactgggattaagggccacacgaaagaagccgttggggatgtggcgaagctggttgaaactgccaaggttcaaaccatggacattgtccaccacctcggccagcttacccaccaggctaaaaaagcaatcatgaccaataacctccctggcttaggggagattttgaaccagtcccaccaactcttaaaggatttaactgtcagcaatcccaagttagaccaacttgtccaagcagcccaagatgctggagcttgcggagctaagttaaccggtgggggccggggtggttgcatgattgccctagcccaaagcaaccaggatgcctccaatattgcccaaaaattggaaaaagcgggagccattgaaacctggatccaccccttaggagaagccaaccatgactaa

SEQ ID NO: 2626 - protein, 317 aa, Alloiococcus otitidis
MTLVKNVAKGTAHGKIILIGEHAVVYNMPAIALPFTTATITVEVSPYQGKSYLESACYCGSLDQAPGDLAGLQACLTAVCADLDQSSDHLYIKVDSMIPAERGMGSSAAVATALVKALFHYFQVDLSSEALSAYVEIAEKITHGKPSGLDATVVNSIAPVYFKRNQLPKAIPLNVDGYLIAADTGIKGHTKEAVGDVAKLVETAKVQTMDIVHHLGQLTHQAKKAIMTNNLPGLGEILNQSHQLLKDLTVSNPKLDQLVQAAQDAGACGAKLTGGGRGGCMIALAQSNQDASNIAQKLEKAGAIETWIHPLGEANHD

SEQ ID NO: 2627 - DNA, 333 bp, Alloiococcus otitidis
  CDS (40)..(330)
tcatggttggcttctcctaaggggtggatccaggtttcaatggctcccgctttttccaatttttgggcaatattggaggcatcctggttgctttgggctagggcaatcatgcaaccaccccggcccccaccggttaacttagctccgcaagctccagcatcttgggctgcttggacaagttggtctaacttgggattgctgacagttaaatcctttaagagttggtgggactggttcaaaatctcccctaagccagggaggttattggtcatgattgcttttttagcctggtgggtaagctggccgaggtggtggacaatgtccatggtttga

SEQ ID NO: 2628 - protein, 97 aa, Alloiococcus otitidis
MAPAFSNFWAILEASWLLWARAIMQPPRPPPVNLAPQAPASWAAWTSWSNLGLLTVKSFKSWWDWFKISPKPGRLLVMIAFLAWWVSWPRWWTMSMV

SEQ ID NO: 2629 - DNA, 333 bp, Alloiococcus otitidis; identical to SEQ ID NO: 2627
  CDS (7)..(330)

SEQ ID NO: 2630 - protein, 108 aa, Alloiococcus otitidis
MASPKGWIQVSMAPAFSNFWAILEASWLLWARAIMQPPRPPPVNLAPQAPASWAAWTSWSNLGLLTVKSFKSWWDWFKISPKPGRLLVMIAFLAWWVSWPRWWTMSMV

SEQ ID NO: 2631 - DNA, 975 bp, Alloiococcus otitidis
  CDS (46)..(972)
agaatcaaatttgttttaaaattatcagcttttggaggtcagaacatgaacaattcccgtatttttttagtctatgaccgtaaagactggcagtctcttagagaaaatgccagcctttctttaacggaaaaaaacctaaataacttgcgtgcagtgaatgacgtcatatcgatggaagatgtccgagaagtttacgtccccattatccaattactggatgtctacataaaaagttactaccgccaccaggcttccttgatcaattacttgaacctggaccagcctaaaaagtaccaaccctatgtgattgggattgcagggagcgtggctgtgggcaagtctacggttgccaggcttcttaagtccctcttgagcgactactatccggaaaaaaaggtagacctcctcacaacagatggcttcctttatccgaataagattttaaaagagcgagatatcatggaccgcaagggttttcccgaaagctatgatatgaaacgtttgattaactttatgaccgatgtcaaaaataatgttcccaacatccaggtgcccaagtattcccaccaagtttacgacatagtagaaggggaaaggttgaccattaaccagccagacatcttgattgtcgaagggatcaatgtgctccaacttccttctaatgagaagatttttgttagcgattttttcgacttctccttttatgtggatgcctcagaaaatctgattgaaaaatggtacatgcaacgctttggcacctttatggataccgccttccaagaccccaacaactattactacaagtttaatgactgggaccgcaaggaagcttttgcctatgccaaccaagtttgggaaacggttaacctagaaaacctcagggaatatattctacccacccgactccgggctaacctcatcctccataaaacccataaccactacatcgacaagattttactcaaaaaacactga

SEQ ID NO: 2632 - protein, 309 aa, Alloiococcus otitidis
MNNSRIFLVYDRKDWQSLRENASLSLTEKNLNNLRAVNDVISMEDVREVYVPIIQLLDVYIKSYYRHQASLINYLNLDQPKKYQPYVIGIAGSVAVGKSTVARLLKSLLSDYYPEKKVDLLTTDGFLYPNKILKERDIMDRKGFPESYDMKRLINFMTDVKNNVPNIQVPKYSHQVYDIVEGERLTINQPDILIVEGINVLQLPSNEKIFVSDFFDFSFYVDASENLIEKWYMQRFGTFMDTAFQDPNNYYYKFNDWDRKEAFAYANQVWETVNLENLREYILPTRLRANLILHKTHNHYIDKILLKKH

SEQ ID NO: 2633 - DNA, 1410 bp, Alloiococcus otitidis
  CDS (4)..(1407)
cggatgaaaacttatgacaaactttactacgatggccagtggcaagaagctaagtcggatgactacagggaagtcatcaactcagctaatgaagaagttatcgctaaggtcaaaagtgccagcaaggaagatatcgatttggcggttcaatcagccaatgaagcctttgacagctggagtcagttagaccccaaagaccgggctagctaccttgagcaaatcgcccaagggatagaggatcgattagatgaaatagcagaaacagtagttttagaattagggtcttccagggactttagccaaagtgctcaggcccaaaatgccgttaatgaaatgcgggccacccttaaagattttgcagacttttcctttgttgaccaagtggaccaggggcaagtggtcaaggagggaactggggtcgttgcttgtatcaccccttggaacttccctctcaaccagattcaacgtaagatgaccccagcccttttagccggcaataccgttgtggtcaaaccagcttctgaaacccctttaactgcctacatcttagctgacattatccaccaggttggcttgcccaagggtgtctttaacatggtctttgggtcaggatctagtgtcggggactacctggcagaccacccagatatcgccttaatttcctttaccgggtctactgaagtgggccgtttgatgtaccaaaaagcaggcaaagggattaagcgcctggttttggaacttggaggcaagtcagccatggtcttcttagaagggggcgacttggaagctgcagttaaacaagcggccgatacggtcttggacaaccagggccagacctgttctgccttgtcccgcttaatcgtcccaggtgaccggctggaagacaccaaggctatcctcaaagattactaccaagacatccaggtcggtgaccctagccaagatggggtcaaggtcggaccgatggtgtcaaaagaccaataccaaagggtcttagactatattgcaaaaggtaaggaagaaggcgcccaagtcttactgggtggccaggcggtggaaggtcctggttactttatccaaccgaccgtctttaccgaagccacaaatgacatgactatcgctcgagaagaaattttcggaccagtcttgaccgttttaacctatgatagtgtcgaagaagccattgctattgccaatgactccccttatggtttgagtggggcggtgactgggcctaaagatgaagcttttgaagtggccaaacgcttgcggacagggaatgtgaatgtcaaccaagccagccgcaatccaagactgccttttgggggctacaaggagtctggttttggccgagaaaacgggatttacgccctcgatgactacctggaactcaaggcaatttttgaataa

SEQ ID NO: 2634 - protein, 468 aa, Alloiococcus otitidis
MKTYDKLYYDGQWQEAKSDDYREVINSANEEVIAKVKSASKEDIDLAVQSANEAFDSWSQLDPKDRASYLEQIAQGIEDRLDEIAETVVLELGSSRDFSQSAQAQNAVNEMRATLKDFADFSFVDQVDQGQVVKEGTGVVACITPWNFPLNQIQRKMTPALLAGNTVVVKPASETPLTAYILADIIHQVGLPKGVFNMVFGSGSSVGDYLADHPDIALISFTGSTEVGRLMYQKAGKGIKRLVLELGGKSAMVFLEGGDLEAAVKQAADTVLDNQGQTCSALSRLIVPGDRLEDTKAILKDYYQDIQVGDPSQDGVKVGPMVSKDQYQRVLDYIAKGKEEGAQVLLGGQAVEGPGYFIQPTVFTEATNDMTIAREEIFGPVLTVLTYDSVEEAIAIANDSPYGLSGAVTGPKDEAFEVAKRLRTGNVNVNQASRNPRLPFGGYKESGFGRENGIYALDDYLELKAIFE

SEQ ID NO: 2635 - DNA, 1518 bp, Alloiococcus otitidis
  CDS (76)..(1515)
actaggaggactataatagtgacccagtatgcgaatgattctttagccttgcacaccgacctgtatgaaattaatatgatcttaacccactggcagaaggggaatgctgaccgccgtgctgtttttgaaatgtacttccgagacaacccctttggcatgggctatgccatttttactggcttggagcggttgattgattatatcgaaaatttgcacttttcaaaaagcgatatcgactacctgcgggatagccaaaactaccctgaagaattcctggattatctggccaattggcactttaggggcagcatccggtcctacaaggaaggggaggtggcctttgccaatgaacccttgattcaggttgagggccccattgtggactgccaattgattgaaactgctcttttgaatattgttaatttccagaccctgattgccaccaaagctgcccaaattaaaaccgttgcccaggaagattctgtcttggaattcggatcacgccgggcccaagagattgacgccagtgtctggggtgcccgggcgacctatataggcggttgtgacgcaactagtaatgttttagctggcaagcgttttggcattccaatagctgggacccatgcccatgccttgatccaggcctaccgggatgaggtggaagccttccgtgcctatgcggagacccaccgagattgcattttcctggtggatacttacaataccttagattctggtgtccccaatgccatccaggtggccagagaatttggcgacaagattaacttcaagggggttcgcttggactcaggcgacttgtcctacttgtctaaacgggtccgccagcagttagatgaagcgggtttccccgaagctaaaatttatgcttccagtgacttggattcgtcaaccatcctaaatttaaaaatgcagggtgctaaaattgatgtctggggggtaggaaccaaattaatcactgcctatgaccagccagccttaggaggggtttacaagttggtttccgtccagggcaatgacggccagatgcacaacacactcaaactaacaggggatgccgacaagatctccaccccaggtaaaaagcaagtttaccgaatccacagccagcaaggacgcaaacctgaaggggactatatcacttttgatgatgagaaaattgatgaaaaaggcgacctcttcatgttccaccctaaacacccctacatcaataaaacggtcaaggactttaaggctagaccccttctccacgacatctacattaacggggaattagtctacgacaaaccagatctcgagagtatccgggcctattctgaccaatctttagatgaattttacgaagaatacaagcgggttttaaaccctgaaaattacccggttgacttatcagaagacctttttaatgctaaaatggaaacgatcaaagaatttagacaccaggcccaatccaaggagacgagaaaggtttttgatgccaaagaaaaaggtgaagcttaa

SEQ ID NO: 2636 - protein, 480 aa, Alloiococcus otitidis
MILTHWQKGNADRRAVFEMYFRDNPFGMGYAIFTGLERLIDYIENLHFSKSDIDYLRDSQNYPEEFLDYLANWHFRGSIRSYKEGEVAFANEPLIQVEGPIVDCQLIETALLNIVNFQTLIATKAAQIKTVAQEDSVLEFGSRRAQEIDASVWGARATYIGGCDATSNVLAGKRFGIPIAGTHAHALIQAYRDEVEAFRAYAETHRDCIFLVDTYNTLDSGVPNAIQVAREFGDKINFKGVRLDSGDLSYLSKRVRQQLDEAGFPEAKIYASSDLDSSTILNLKMQGAKIDVWGVGTKLITAYDQPALGGVYKLVSVQGNDGQMHNTLKLTGDADKISTPGKKQVYRIHSQQGRKPEGDYITFDDEKIDEKGDLFMFHPKHPYINKTVKDFKARPLLHDIYINGELVYDKPDLESIRAYSDQSLDEFYEEYKRVLNPENYPVDLSEDLFNAKMETIKEFRHQAQSKETRKVFDAKEKGEA

SEQ ID NO: 2637 - DNA, 1518 bp, Alloiococcus otitidis; identical to SEQ ID NO: 2635
  CDS (49)..(1515)

SEQ ID NO: 2638 - protein, 489 aa, Alloiococcus otitidis
MHTDLYEINMILTHWQKGNADRRAVFEMYFRDNPFGMGYAIFTGLERLIDYIENLHFSKSDIDYLRDSQNYPEEFLDYLANWHFRGSIRSYKEGEVAFANEPLIQVEGPIVDCQLIETALLNIVNFQTLIATKAAQIKTVAQEDSVLEFGSRRAQEIDASVWGARATYIGGCDATSNVLAGKRFGIPIAGTHAHALIQAYRDEVEAFRAYAETHRDCIFLVDTYNTLDSGVPNAIQVAREFGDKINFKGVRLDSGDLSYLSKRVRQQLDEAGFPEAKIYASSDLDSSTILNLKMQGAKIDVWGVGTKLITAYDQPALGGVYKLVSVQGNDGQMHNTLKLTGDADKISTPGKKQVYRIHSQQGRKPEGDYITFDDEKIDEKGDLFMFHPKHPYINKTVKDFKARPLLHDIYINGELVYDKPDLESIRAYSDQSLDEFYEEYKRVLNPENYPVDLSEDLFNAKMETIKEFRHQAQSKETRKVFDAKEKGEA

SEQ ID NO: 2639 - DNA, 1518 bp, Alloiococcus otitidis; identical to SEQ ID NO: 2635
  CDS (19)..(1515)

SEQ ID NO: 2640 - protein, 499 aa, Alloiococcus otitidis
MTQYANDSLALHTDLYEINMILTHWQKGNADRRAVFEMYFRDNPFGMGYAIFTGLERLIDYIENLHFSKSDIDYLRDSQNYPEEFLDYLANWHFRGSIRSYKEGEVAFANEPLIQVEGPIVDCQLIETALLNIVNFQTLIATKAAQIKTVAQEDSVLEFGSRRAQEIDASVWGARATYIGGCDATSNVLAGKRFGIPIAGTHAHALIQAYRDEVEAFRAYAETHRDCIFLVDTYNTLDSGVPNAIQVAREFGDKINFKGVRLDSGDLSYLSKRVRQQLDEAGFPEAKIYASSDLDSSTILNLKMQGAKIDVWGVGTKLITAYDQPALGGVYKLVSVQGNDGQMHNTLKLTGDADKISTPGKKQVYRIHSQQGRKPEGDYITFDDEKIDEKGDLFMFHPKHPYINKTVKDFKARPLLHDIYINGELVYDKPDLESIRAYSDQSLDEFYEEYKRVLNPENYPVDLSEDLFNAKMETIKEFRHQAQSKETRKVFDAKEKGEA

SEQ ID NO: 2641 - DNA, 846 bp, Alloiococcus otitidis
  CDS (7)..(843)
agcttaatgggagacgatttaagagaagaaattcttgaccgaatgaaggtccaagcccaaattaaccccaatgaggaaattcgccggaccattgactttatcaaggactatctccaggcccaccccttctttgaatccttaatcttgggcatctccggtggccaggattccaccctcctgggtaagctagcccagatggcctgccttgaactgagggaagaggaggggtctgacaagccaatttttattggtatccgcctaccttatggggatcaatttgatgaagcagaagcccagcaagccctcaattggatccagcctgaccaggctctgaccattaatatcaaagagtccgttgatggcctggttgacactttggccggccaaggcattgaagtttctgactttaacaagggcaatatcaaagctcggatccgaatggtggcccaatatggcgtagcgggtcacttccacggggcggtgttaggatctgaccattcagccgaaaatgtaactggctttttcaccaagcatggggacggcgctagtgacctcaaccctcttttccgcctaaataaacgtcagggacgggccctgcttgaggaattagggtcccctaagaacttgtaccaaaagacccccacagctgatttggaagaagaccagcccggcttgtcagatgaagacaagttaggggtttcttatgaagccattgatgactacttggagggcaagccagttagccaggaggaccaggcaaccatcgaaaaatggtatcaacaaacggcccacaagcgccacttgccggtgactatctttgatgatttttggaaagaaaaaaattag

SEQ ID NO: 2642 - protein, 279 aa, Alloiococcus otitidis
MGDDLREEILDRMKVQAQINPNEEIRRTIDFIKDYLQAHPFFESLILGISGGQDSTLLGKLAQMACLELREEEGSDKPIFIGIRLPYGDQFDEAEAQQALNWIQPDQALTINIKESVDGLVDTLAGQGIEVSDFNKGNIKARIRMVAQYGVAGHFHGAVLGSDHSAENVTGFFTKHGDGASDLNPLFRLNKRQGRALLEELGSPKNLYQKTPTADLEEDQPGLSDEDKLGVSYEAIDDYLEGKPVSQEDQATIEKWYQQTAHKRHLPVTIFDDFWKEKN

SEQ ID NO: 2643 - DNA, 1176 bp, Alloiococcus otitidis
  CDS (37)..(1173)
tttttggaaagaaaaaaattagaaagaagtggaaaaatggcaagcgtttttactaatgcgaagatttactgcggtaaccaggtgattgatccaggctttatccgttttgaccgagatatccagcaggttggttccatgacagactaccaagaagaagaccaagaccaggttaaggatctttcaggtcagatcattatccctggttttatcgatatccatagccacggggggtacgggattgacaacatggatgctgaccctgacaagattgatgagatggtggactttttcttaaacgaagggattacttcttactttgccactaccatgtcccaaactgcccctaatattaccgctgccatggaagctattgcccaagccatgaaaaaaaacgaccgaatcttaggtgtccacttggaaggcccttttattaacgagaaacacaagggagcccaatcagctgaccacattgtcccagctaacttggacctcctcaaaaaatggcaggacatcactggtggtaaaattaagttgattacttacgcccctgagcagggaaatgttaaggcctttgaagactactgcctggaccaaggtattgtcctttctgctggccatacggatgcgacttacgacgtcttagaccagtcccccatcagccatatcacccacctctttaacggtcaaagagggatccaccaccgggaacccggcactgcaggatttggcttgttaaaaggggacgacattaaggttgagttgattgtagacggccaccatattgaccctaaaatggtggactttgcctaccggatgaagggggcgaagggcattgtcttggtgacggactccatgcgggcgaaaggtttgccggatggtgagagtgagttgggtggtcaaaaagtaattgttaaagacagcaccgcccggctagaaagtggttccttggcaggtagtgccttgacctatattgacgcttttagaaatatgattaactatagtcattgttccattgaagaggctgttttaatgtcttcgaccaaccaggccgaggagtttaaattagacggcaagggctatctggctcaaggttatgacagtgactttttggtcttagacaaggacttgaatttgaagcaaaccatcgcagcaggtcaggtgcacgactgccaataa

SEQ ID NO: 2644 - protein, 379 aa, Alloiococcus otitidis
MASVFTNAKIYCGNQVIDPGFIRFDRDIQQVGSMTDYQEEDQDQVKDLSGQIIIPGFIDIHSHGGYGIDNMDADPDKIDEMVDFFLNEGITSYFATTMSQTAPNITAAMEAIAQAMKKNDRILGVHLEGPFINEKHKGAQSADHIVPANLDLLKKWQDITGGKIKLITYAPEQGNVKAFEDYCLDQGIVLSAGHTDATYDVLDQSPISHITHLFNGQRGIHHREPGTAGFGLLKGDDIKVELIVDGHHIDPKMVDFAYRMKGAKGIVLVTDSMRAKGLPDGESELGGQKVIVKDSTARLESGSLAGSALTYIDAFRNMINYSHCSIEEAVLMSSTNQAEEFKLDGKGYLAQGYDSDFLVLDKDLNLKQTIAAGQVHDCQ

SEQ ID NO: 2645 - DNA, 1176 bp, Alloiococcus otitidis; identical to SEQ ID NO: 2643
  CDS (4)..(1173)

SEQ ID NO: 2646 - protein, 390 aa, Alloiococcus otitidis
MERKKLERSGKMASVFTNAKIYCGNQVIDPGFIRFDRDIQQVGSMTDYQEEDQDQVKDLSGQIIIPGFIDIHSHGGYGIDNMDADPDKIDEMVDFFLNEGITSYFATTMSQTAPNITAAMEAIAQAMKKNDRILGVHLEGPFINEKHKGAQSADHIVPANLDLLKKWQDITGGKIKLITYAPEQGNVKAFEDYCLDQGIVLSAGHTDATYDVLDQSPISHITHLFNGQRGIHHREPGTAGFGLLKGDDIKVELIVDGHHIDPKMVDFAYRMKGAKGIVLVTDSMRAKGLPDGESELGGQKVIVKDSTARLESGSLAGSALTYIDAFRNMINYSHCSIEEAVLMSSTNQAEEFKLDGKGYLAQGYDSDFLVLDKDLNLKQTIAAGQVHDCQ

SEQ ID NO: 2647 - DNA, 738 bp, Alloiococcus otitidis
  CDS (67)..(735)
ctggcagatagggggctaacattgacagaccaagagttatctgtttacatcaagattcacaatcaaatgcgagagcaaattaaacaaggccagtggaaggaaggacagaagatcccttccgaacgcaacttggccgaccgctacaatgttagccgaatgaccgctagagcagccatcaacagcttggtggctgacggtttactagaacgccgggtggggtctggcacctatgtttctgttagtaagattaaagaaaaactcaacggtctagccagctttactgaaacggttgaaaagctgggcaagcacccctctagcaagctagttgcctactacactaaaaatgcgaattccagtgaagtggataaattgcagctccaagcaggtgaaaaagtcctggtcttggagcgggtccgctatgctgaccaggtccccatctgctatgaacaggcatccatacccaacaggattgccgaccagctgaataaagaaagcattaccagtcacctctatcagagcttggaggaggaaggcattcttcaagtagcctatgctgaccaaaccatatcagctagctgggccaatgaagctatggcagatttactcgaaatcaaccggggcgaccccatcttaagcttgcgacaagtcacttacagtcagacaggccaagcttttgaatacgttcggtccaagtatgtcggagaccggtatgaaatggtcatccggtcaagcaaataa

SEQ ID NO: 2648 - protein, 223 aa, Alloiococcus otitidis
MREQIKQGQWKEGQKIPSERNLADRYNVSRMTARAAINSLVADGLLERRVGSGTYVSVSKIKEKLNGLASFTETVEKLGKHPSSKLVAYYTKNANSSEVDKLQLQAGEKVLVLERVRYADQVPICYEQASIPNRIADQLNKESITSHLYQSLEEEGILQVAYADQTISASWANEAMADLLEINRGDPILSLRQVTYSQTGQAFEYVRSKYVGDRYEMVIRSSK

SEQ ID NO: 2649 - DNA, 738 bp, Alloiococcus otitidis; identical to SEQ ID NO: 2647
  CDS (22)..(735)

SEQ ID NO: 2650 - protein, 238 aa, Alloiococcus otitidis
MTDQELSVYIKIHNQMREQIKQGQWKEGQKIPSERNLADRYNVSRMTARAAINSLVADGLLERRVGSGTYVSVSKIKEKLNGLASFTETVEKLGKHPSSKLVAYYTKNANSSEVDKLQLQAGEKVLVLERVRYADQVPICYEQASIPNRIADQLNKESITSHLYQSLEEEGILQVAYADQTISASWANEAMADLLEINRGDPILSLRQVTYSQTGQAFEYVRSKYVGDRYEMVIRSSK

SEQ ID NO: 2651 - DNA, 1026 bp, Alloiococcus otitidis
  CDS (16)..(1023)
agaaagaggaagtttatgcgtggtaaccaacataaaaagaataagtggctaaggatagtcttgttttttattgctggtatcatgctcattgttggtggtatctttggttattatgcctaccgaaccaaccaatttgtccaagaagtttctgtagcccaagaagaaagaccacaagaccagttagactacaaccagatccaagagaagaaacctttttctatcttactgctgggcatggatatggataatggtctgacttcacggaccgataccattatggtggctagcatcaatccggactcagaagatattaaactcgtctccatcccaagggacaccctggtcgaaacggattttggtcttactgagaaaattaatgccatgtacacttatggcgggattgacctcatgatcaaggaagttgaaaaactcctagacatccccatctcccactacgccattttggacttccaaggtttggctgacttggttgatgctgtcgggggaatccggattaagtctgaccttgcctttactgaaagtaatagtttgggtgggggccaacctatcgaaatccaagagggctggcaagagctgaacggggaagaagcactgggctttgcccggatgcggaagcaggatcccaaaggtgattatggtcggcaggaacgccagcaaaaagtcatcaaggccctggcccgggaattcacgaccatgaatgtcctggccaagtttaaccccattttaaatgccatctccccccacctgtctaccaacttagatggtgagcagatgctgaccttggccatgaactaccgagaggcagcacaagatattgagactttcctgatggatggctctgacacaacaatcttcttccctcattacggcttcaatgtttatggactagagcccgacccagacagtttggaagacctgtcagataccttccaagaccacttggaggttaaaggtctccatgatggtagggcaaacttgcaaacagatgaggaactagaatcctaa

SEQ ID NO: 2652 - protein, 336 aa, Alloiococcus otitidis
MRGNQHKKNKWLRIVLFFIAGIMLIVGGIFGYYAYRTNQFVQEVSVAQEERPQDQLDYNQIQEKKPFSILLLGMDMDNGLTSRTDTIMVASINPDSEDIKLVSIPRDTLVETDFGLTEKINAMYTYGGIDLMIKEVEKLLDIPISHYAILDFQGLADLVDAVGGIRIKSDLAFTESNSLGGGQPIEIQEGWQELNGEEALGFARMRKQDPKGDYGRQERQQKVIKALAREFTTMNVLAKFNPILNAISPHLSTNLDGEQMLTLAMNYREAAQDIETFLMDGSDTTIFFPHYGFNVYGLEPDPDSLEDLSDTFQDHLEVKGLHDGRANLQTDEELES

SEQ ID NO: 2653 - DNA, 312 bp, Alloiococcus otitidis
  CDS (67)..(309)
aatggggttaaacttggccaggacattcatggtcgtgaattcccgggccagggccttgatgactttttgctggcgttcctgccgaccataatcacctttgggatcctgcttccgcatccgggcaaagcccagtgcttcttccccgttcagctcttgccagccctcttggatttcgataggttggcccccacccaaactattactttcagtaaaggcaaggtcagacttaatccggattcccccgacagcatcaaccaagtcagccaaaccttggaagtccaaaatggcgtagtgggagatggggatgtctag

SEQ ID NO: 2654 - protein, 81 aa, Alloiococcus otitidis
MLAFLPTIITFGILLPHPGKAQCFFPVQLLPALLDFDRLAPTQTITFSKGKVRLNPDSPDSINQVSQTLEVQNGVVGDGDV

SEQ ID NO: 2655 - DNA, 651 bp, Alloiococcus otitidis
  CDS (13)..(648)
gcaggtgtctttatggaatcatactacacaattaaagaagcgggcagttatgaaattgaaattaacaagtcccgttttatttgccagatatctcgaacagagaccgaggaccaagccaatgactttatcgagtccgtcaaaaaagaccactacaaggccacccacaattgctcagcctacactattggaatgaaggatgacattcaaagggcccatgacgatggtgagccgagtgggacagctggtgtacccatgctagaaatcctcaaaaagcgggaactgaagaatgtgactgcagtggtcacccggtattttggcgggaaaaaactaggtgctggtggcttgatccgggcttatagcggggctgttaatgatgcagtgaagtctattggtgtagtcaaacgtcaatccttgcaagcccttgatgtgaccgttccctacccggtttccggcagtttagaaaatgcactgagagggtccgactacctcttaaacaataccgaatacacagaccaggttacttttaaatgctttgtcgaacctgaaaaagtagaccaattgaagtcagaagtgattgaatggaccaatgaccaggctagtttccacctgggtgccaaagcttacattgatattgaccaagaaatcaattaa

SEQ ID NO: 2656 - protein, 212 aa, Alloiococcus otitidis
MESYYTIKEAGSYEIEINKSRFICQISRTETEDQANDFIESVKKDHYKATHNCSAYTIGMKDDIQRAHDDGEPSGTAGVPMLEILKKRELKNVTAVVTRYFGGKKLGAGGLIRAYSGAVNDAVKSIGVVKRQSLQALDVTVPYPVSGSLENALRGSDYLLNNTEYTDQVTFKCFVEPEKVDQLKSEVIEWTNDQASFHLGAKAYIDIDQEIN

SEQ ID NO: 2657 - DNA, 1359 bp, Alloiococcus otitidis
  CDS (226)..(1356)
ggtggtgaaatgaaagaggaattactatacggccggcagcttttaatccgggaactacccccagatttcgacccggcctccaagggaaagcttcaaagctatccggcttttgaggaaaaatctggcaagtggttttgccgccggtgcggttccagggttgccccgattaaacccactttttgccaatgtggccaggaatgtggctactgcacccagtgtattcaaatgggcaaggtcaaaagatgcctgtctttttatcatattgaagaggaaaatcgtttccccaagataaaagatcccctggcctggcaaggcaaattgtcgagtcaacaagacaaggctgcccaagatattgttcaagccgtcctcaaccgtcaaacccttttggtatgggctgtggccggggctggcaaaacagaaatgctctttaaaggcttggccctggctattgagaagggttaccggatcggcttggcttcaccccgagtggatgtttgcctggaactttatcccaggctccaggcagccttccctaaactggctatttccctactctacggtcaaatggaagaagactatgcctatcgtcagatgaccattgctaccacccaccagctcttacggttcaagcaagcctttgaccttctcatcattgatgaaattgatgccttcccctttgacactgaccttatcttgcaaaggggggcagaccaggcccggaaggaagaatcggctttaatctacttaacggccactcctaaccggcagatgcagaagcaaatcaaacaaaagaaaatccaagctactatcctgccggctcgctaccatggtcatcctctaccagttccccagctgaagcgatctaaaaattggcaagccaacttactcaagaaggctggaaagaacccggtcgaccgggccatcgccagtcgcctccaagcagggcgccgttttttgattttcctacccaatattgcctggtccaagcaatgggagggggtccttgaagccaagtttcctcaggctaactttgctactgtccatgcccaggaccccgaccgtaaaagcaaggtcatggccatgagagggcaagagttggattttttagtgaccaccaccatcttggaaagaggggtgacctttcctaatattgatgttttggtagtaggagcctgcgaccgggtgtttaccgaatcttctttggttcaaatttcgggacgggtaggccggtcacccgactatccgactggggacatcctatttttttatcatgagactagtctggccatgaagcgggcagtcaagcaaattaagcaaatgaataaactagcaagaaagcggggattattacatgaatga

SEQ ID NO: 2658 - protein, 377 aa, Alloiococcus otitidis
MGKVKRCLSFYHIEEENRFPKIKDPLAWQGKLSSQQDKAAQDIVQAVLNRQTLLVWAVAGAGKTEMLFKGLALAIEKGYRIGLASPRVDVCLELYPRLQAAFPKLAISLLYGQMEEDYAYRQMTIATTHQLLRFKQAFDLLIIDEIDAFPFDTDLILQRGADQARKEESALIYLTATPNRQMQKQIKQKKIQATILPARYHGHPLPVPQLKRSKNWQANLLKKAGKNPVDRAIASRLQAGRRFLIFLPNIAWSKQWEGVLEAKFPQANFATVHAQDPDRKSKVMAMRGQELDFLVTTTILERGVTFPNIDVLVVGACDRVFTESSLVQISGRVGRSPDYPTGDILFFYHETSLAMKRAVKQIKQMNKLARKRGLLHE

SEQ ID NO: 2659 - DNA, 1359 bp, Alloiococcus otitidis; identical to SEQ ID NO: 2657
  CDS (10)..(1356)

SEQ ID NO: 2660 - protein, 449 aa, Alloiococcus otitidis
MKEELLYGRQLLIRELPPDFDPASKGKLQSYPAFEEKSGKWFCRRCGSRVAPIKPTFCQCGQECGYCTQCIQMGKVKRCLSFYHIEEENRFPKIKDPLAWQGKLSSQQDKAAQDIVQAVLNRQTLLVWAVAGAGKTEMLFKGLALAIEKGYRIGLASPRVDVCLELYPRLQAAFPKLAISLLYGQMEEDYAYRQMTIATTHQLLRFKQAFDLLIIDEIDAFPFDTDLILQRGADQARKEESALIYLTATPNRQMQKQIKQKKIQATILPARYHGHPLPVPQLKRSKNWQANLLKKAGKNPVDRAIASRLQAGRRFLIFLPNIAWSKQWEGVLEAKFPQANFATVHAQDPDRKSKVMAMRGQELDFLVTTTILERGVTFPNIDVLVVGACDRVFTESSLVQISGRVGRSPDYPTGDILFFYHETSLAMKRAVKQIKQMNKLARKRGLLHE

SEQ ID NO: 2661 - DNA, 309 bp, Alloiococcus otitidis
  CDS (13)..(306)
gtggttgggaaaatgacttttgatgcagtctttcaagacctggccaaaaaccagaccatagcggatatcccccttcatcttgaattcaaacatccagtccttggcaaaatcatcgtagtaaaacaaggccaagtgccggcccgatatgtcaggatactggtcttgccaagcttggcaatcggcacagacctccccactgtcaaggtacttggagcaagttggacacatactggttgggtcaattttttggaaacggctaaaacacttaggacaaaccaagccttggtcaatgggcttccacaagactag

SEQ ID NO: 2662 - protein, 98 aa, Alloiococcus otitidis
MTFDAVFQDLAKNQTIADIPLHLEFKHPVLGKIIVVKQGQVPARYVRILVLPSLAIGTDLPTVKVLGASWTHTGWVNFLETAKTLRTNQALVNGLPQD

SEQ ID NO: 2663 - DNA, 714 bp, Alloiococcus otitidis
  CDS (22)..(711)
caagaaagcggggattattacatgaatgacctatgtatccactgccaggaagagtttcaagcacccatttcctttaaagacctagtcttgtggaagcccattgaccaaggcttggtttgtcctaagtgttttagccgtttccaaaaaattgacccaaccagtatgtgtccaacttgctccaagtaccttgacagtggggaggtctgtgccgattgccaagcttggcaagaccagtatcctgacatatcgggccggcacttggccttgttttactacgatgattttgccaaggactggatgtttgaattcaagatgaagggggatatccgctatggtctggtttttggccaggtcttgaaagactgcatcaaaagtcattttcccaaccacctactggtccccattccttcttcgacaccccactttaaggaccggggttttaaccaaatcgatgttatccttagtgtcctgtcctttgaatatgaagatttactggccaacacgagccatggccttggccaggctaaaaaaactagagcagaccgcttgcgaaccgaccagcccttttcctaccggggggcaggggacttgtcccagatggatatcctacttgtcgatgacgtttatacgactggccgcaccctttaccatgctaaaaggcttttaactgaccagggagctagacgggtggacagtttgtccctcttccgttaa

SEQ ID NO: 2664 - protein, 230 aa, Alloiococcus otitidis
MNDLCIHCQEEFQAPISFKDLVLWKPIDQGLVCPKCFSRFQKIDPTSMCPTCSKYLDSGEVCADCQAWQDQYPDISGRHLALFYYDDFAKDWMFEFKMKGDIRYGLVFGQVLKDCIKSHFPNHLLVPIPSSTPHFKDRGFNQIDVILSVLSFEYEDLLANTSHGLGQAKKTRADRLRTDQPFSYRGAGDLSQMDILLVDDVYTTGRTLYHAKRLLTDQGARRVDSLSLFR

SEQ ID NO: 2665 - DNA, 600 bp, Alloiococcus otitidis
  CDS (22)..(597)
aagatggaagggtgcactactatgttaaggttcaatatacgcggtgagaacattgaagtaaccgatgctttacgcgactacgccgagaagaagatttcaaaaatcgagcgttattttaacaaggaattgaccaatgtcgaagcccatgttaatttgaaaacttactccgaccgaagtgctaaagtggaagttaccgtcccactttccaatattgtcttgcgggctgaggaaacctcccaagatatgtacggcagtattgacttagtggcagataagcttgagcgacaaattcgaaagtataaaactaaagttaatcgcaagatccgtcgggaaaacctatcccggccggaagccattgaccctgatttgtgggatagtgatgtgccggctttggatgataatagcaaggatgatggggatgtttcatcttctatcgtccgcatcaagcaagttgacttgaaacccatgagtccggaggaagccgttttacagatggatttgctaggacatgacttttttatttttgaagatgccgaaacagaaggagtcagcttggtctacaaacgccacgatgaccaatacggcctactcgagacctag

SEQ ID NO: 2666 - protein, 192 aa, Alloiococcus otitidis
MLRFNIRGENIEVTDALRDYAEKKISKIERYFNKELTNVEAHVNLKTYSDRSAKVEVTVPLSNIVLRAEETSQDMYGSIDLVADKLERQIRKYKTKVNRKIRRENLSRPEAIDPDLWDSDVPALDDNSKDDGDVSSSIVRIKQVDLKPMSPEEAVLQMDLLGHDFFIFEDAETEGVSLVYKRHDDQYGLLET

SEQ ID NO: 2667 - DNA, 600 bp, Alloiococcus otitidis; identical to SEQ ID NO: 2665
  CDS (4)..(597)

SEQ ID NO: 2668 - protein, 198 aa, Alloiococcus otitidis
MEGCTTMLRFNIRGENIEVTDALRDYAEKKISKIERYFNKELTNVEAHVNLKTYSDRSAKVEVTVPLSNIVLRAEETSQDMYGSIDLVADKLERQIRKYKTKVNRKIRRENLSRPEAIDPDLWDSDVPALDDNSKDDGDVSSSIVRIKQVDLKPMSPEEAVLQMDLLGHDFFIFEDAETEGVSLVYKRHDDQYGLLET

SEQ ID NO: 2669 - DNA, 2478 bp, Alloiococcus otitidis
  CDS (10)..(2475)
aagaatcagatggcgaacttcttaaaacgtctttttgataatgataaaaaagtcttgcgtcgttacggtaaaattgctgataaaattgaagctttatcagatgatatggctgagttaacagacgaagaattacaggcccggacccaggaatttaagtcccgatatgccaatggcgaaagcttggatgaaatgctagtagagacctttgctaccatgcgggaagcagctaagcgggtcttgggcctttaccccttccgtgtccagttgcaagggggaatggccctgcatgaagggaacattgctgagatgaagactggtgaagggaagaccttaacagccactatgccggtctatttaaatgccatctctggcaagggtgtccatgttgtcactgttaacgactacctagccacccgggatgctgaagagatgggtgagctttaccgttggatggggctgacggttggtttgaacctcaactctaagaacgccgacgaaaaacgggatgcctacaattgcgatattacttactcaaccaataatgagttaggctttgactacttaagagacaatatggtggtctacaaggaacaaatggtccaaagaccccttaacttcgctatcttggatgaggtcgactcgattttaattgacgaggcccggaccccccttattatttcgggtcaagcagaaggatccacttcttactacactcgaactgacttctttgtcaagggtttgaaagaagatgaggattacaccattgatgttcagtccaaaaccattaacctaactgaagaaggtattgaaaaagcagaggataccttcaatgttaaaaacttgtatgatgtggaaaaccaaaccttgatccaccacctagaccaggctttacgagctaactacattatgatcttggacaaggactatgtggttaaagatgatgaagtcaagattgtcgaccagtttacgggacggatcatggaaggtcgccgttattctgacggcctccaccaggcaattgaagctaaagaagatgtagaaattcaaaaagaatccaaaaccatggctaccatcacctttcagaactttttccgtcgttatgccaaactctctggtatgaccgggacagctaagacagaggaagaagagttccgagaaatatacaatatggatgttattgctgttccaaccaacagaccggtagcccgggatgacaaggatgatctcctataccctaccttggacagcaagttcaaggcagcagcccaggacatcaaggaacgtcatgaaattggccaacctgttttagttgggaccgtagcggtggaaacatctgaagttatctcccgctacctgcaagaactagacgtcccccatgaaattttgaatgccaaaaaccactttaaagaagcagatattattgttaatgctggtcaacctggtgcagtgaccatcgccaccaacatggctggccgggggactgatatcaagttaggccctggtgtcaaagaactgggtgggctagccgttatcgggacggaacgccacgaatcacgtcggattgacaaccagttgcgtggtcggtcaggccggcaaggggacccgggtgtttctcaattttacttgtccttagaagatgacctcatgcgacggtttgggtctgagcggatccagtctgttttagagcaactgaaaatttctggtgacgatgcagtgatccaaagtcggatgatctcccgccaggtagaatcagcccaaaaaagggtggaagggaacaactacgatacccgtcgaaatgtcttgaaatatgatgatgttatgcgggaacagcgggaagttatttacgcccaacgccaagaagtcattatggaagaggattctctttcttacgttgtcaatccaattatccgtcgtaccatcgatggggctgtgaatattaatacccaaagcgatgactcctcaaaatgggacttagaccagttagttgattttgcccaccaagttttattgccggctgattccatttccaaggaagacttgtatggacgggaccgggaaggcatccgggactaccttaaccagttgactactgaagcttaccaggaaaaaatcagtcaatttaatggagaagagcaagtcttggaattcgagaaagttgtcaccctccgtgtggttgaccgcaaatggaccaaccatattgatgagatggaccaactccgacaggggattggcctccggtcttacggccagttcaatcccttgactgaataccagcaagaaggtgcccgcctctttgaagagatgatcggtgaaattgaatacgaaatcacccgcctattgatgaagtctgaaatcagacaaaacttacagcgggaacaagctagtgcggacggcaagggtaagaaagctaaaagaccggctaagaaagatgactatgaatactcccatgacgacgaaaccaataccgtcacgggataa

SEQ ID NO: 2670 - protein, 822 aa, Alloiococcus otitidis
MANFLKRLFDNDKKVLRRYGKIADKIEALSDDMAELTDEELQARTQEFKSRYANGESLDEMLVETFATMREAAKRVLGLYPFRVQLQGGMALHEGNIAEMKTGEGKTLTATMPVYLNAISGKGVHVVTVNDYLATRDAEEMGELYRWMGLTVGLNLNSKNADEKRDAYNCDITYSTNNELGFDYLRDNMVVYKEQMVQRPLNFAILDEVDSILIDEARTPLIISGQAEGSTSYYTRTDFFVKGLKEDEDYTIDVQSKTINLTEEGIEKAEDTFNVKNLYDVENQTLIHHLDQALRANYIMILDKDYVVKDDEVKIVDQFTGRIMEGRRYSDGLHQAIEAKEDVEIQKESKTMATITFQNFFRRYAKLSGMTGTAKTEEEEFREIYNMDVIAVPTNRPVARDDKDDLLYPTLDSKFKAAAQDIKERHEIGQPVLVGTVAVETSEVISRYLQELDVPHEILNAKNHFKEADIIVNAGQPGAVTIATNMAGRGTDIKLGPGVKELGGLAVIGTERHESRRIDNQLRGRSGRQGDPGVSQFYLSLEDDLMRRFGSERIQSVLEQLKISGDDAVIQSRMISRQVESAQKRVEGNNYDTRRNVLKYDDVMREQREVIYAQRQEVIMEEDSLSYVVNPIIRRTIDGAVNINTQSDDSSKWDLDQLVDFAHQVLLPADSISKEDLYGRDREGIRDYLNQLTTEAYQEKISQFNGEEQVLEFEKVVTLRVVDRKWTNHIDEMDQLRQGIGLRSYGQFNPLTEYQQEGARLFEEMIGEIEYEITRLLMKSEIRQNLQREQASADGKGKKAKRPAKKDDYEYSHDDETNTVTG

SEQ ID NO: 2671 - DNA, 1053 bp, Alloiococcus otitidis
  CDS (67)..(1050)
ccaagtatagggggtctctttgacctggaaaaaattcaggcagacctagcagaggcccaggaaatcatgacccagcctgacttttgggatgatcctgacaaggccaaagaagttattgaccagagtaaccaattgaaggagaaggttaatttattccagtccgtccaaggcttggtcgaggaaaacgaaaccatcctagccatgctagaagaaggggaggaccaagacctcttggctgaattggaagccaacctgcaaaaggctcatgaccggttagatgagttagaaattagcctcctccttaatgaggaatatgatggcaacaacgccatcttagaactccaccctggggcaggggggactgagtcgcaagattggggccagatgctctaccggatgtacacccggtggattgacagcaaaggcttccagtatcaagtcctagactaccaagcaggggacgaagcaggtattaagagtgtctccctcttagtcaaggggaccaatgcctatggtttactgaaagcagaaaagggtgtccatcgcttagtccggatctctccatttgactcatcgggacggcgtcacacctctttcgtctcttgcgaagtgaccccagaattggaccaggatatcgaggttgaagtcaagccggaagatattcgaattgatacctaccgggccagtggggcagggggacagcacgttaacaaaacagattcagctgtccggataacccaccaacctacagggtttgtggtccagagccaagctggccggtcgcaactccaaaaccgcgagcaagccatgaccatgctaaaatctaagctttaccaaaaacaagtagaggaaaaagaagctgaaatggctcaggccagaggcgatcagaaggaaattggctgggggtcgcaaatccggtcttatgttttccacccctactccatggttaaagaccaccggaccaagttggagtctggcaacccggatgcagtgatggatggtgacctggatccctttattgaagcctatttgcggtcacaaattgatttatga

SEQ ID NO: 2672 - protein, 328 aa, Alloiococcus otitidis
MTQPDFWDDPDKAKEVIDQSNQLKEKVNLFQSVQGLVEENETILAMLEEGEDQDLLAELEANLQKAHDRLDELEISLLLNEEYDGNNAILELHPGAGGTESQDWGQMLYRMYTRWIDSKGFQYQVLDYQAGDEAGIKSVSLLVKGTNAYGLLKAEKGVHRLVRISPFDSSGRRHTSFVSCEVTPELDQDIEVEVKPEDIRIDTYRASGAGGQHVNKTDSAVRITHQPTGFVVQSQAGRSQLQNREQAMTMLKSKLYQKQVEEKEAEMAQARGDQKEIGWGSQIRSYVFHPYSMVKDHRTKLESGNPDAVMDGDLDPFIEAYLRSQIDL

SEQ ID NO: 2673 - DNA, 696 bp, Alloiococcus otitidis
  CDS (19)..(693)
gtgaatagcatgataagaatggaaaacgtttataaaaaatacgataacgggattacagctttaaataagttgtcggtccaaatcgaccaaggggaatttgtctacttggttggtccctccggggcaggtaagtctacctttatcaagttgatttaccgggaggaggctccaaccaggggaagagtccaggttaatgattacgatactggcaaaatgaagaaaaaatatattcccaaccttagacgggaagttggggttgtttttcaagacttcaaactcctcccccgcctaaccgtttacgaaaatgttgcttatgccatgaaggtggttgagcaaaaacctagggtcatccagcagcgggtcaaccaagtattggacctggtgggcttgaagcacaaaggaaaaatgttcccagaccaaatctctggtggggagcagcagcgggtggccattgcccgggctattgctaatacccccaagattttgattgctgacgaacccaccggtaacttggacccagatacttcctgggaggtcttgcaagtcttggaggaggttaaccgcttaggaacaacggttattatggccacccaccaccaagaaattgttaaccaggccaaacaccgggtgattgccattgaaagtggccggattgccagagatgaaatggagggtgagtatggttaccaagtttag

SEQ ID NO: 2674 - protein, 225 aa, Alloiococcus otitidis
MENVYKKYDNGITALNKLSVQIDQGEFVYLVGPSGAGKSTFIKLIYREEAPTRGRVQVNDYDTGKMKKKYIPNLRREVGVVFQDFKLLPRLTVYENVAYAMKVVEQKPRVIQQRVNQVLDLVGLKHKGKMFPDQISGGEQQRVAIARAIANTPKILIADEPTGNLDPDTSWEVLQVLEEVNRLGTTVIMATHHQEIVNQAKHRVIAIESGRIARDEMEGEYGYQV

SEQ ID NO: 2675 - DNA, 696 bp, Alloiococcus otitidis; identical to SEQ ID NO: 2673
  CDS (10)..(693)

SEQ ID NO: 2676 - protein, 228 aa, Alloiococcus otitidis
MIRMENVYKKYDNGITALNKLSVQIDQGEFVYLVGPSGAGKSTFIKLIYREEAPTRGRVQVNDYDTGKMKKKYIPNLRREVGVVFQDFKLLPRLTVYENVAYAMKVVEQKPRVIQQRVNQVLDLVGLKHKGKMFPDQISGGEQQRVAIARAIANTPKILIADEPTGNLDPDTSWEVLQVLEEVNRLGTTVIMATHHQEIVNQAKHRVIAIESGRIARDEMEGEYGYQV

SEQ ID NO: 2677 - DNA, 696 bp, Alloiococcus otitidis; identical to SEQ ID NO: 2673
  CDS (1)..(693)

SEQ ID NO: 2678 - protein, 231 aa, Alloiococcus otitidis
MNSMIRMENVYKKYDNGITALNKLSVQIDQGEFVYLVGPSGAGKSTFIKLIYREEAPTRGRVQVNDYDTGKMKKKYIPNLRREVGVVFQDFKLLPRLTVYENVAYAMKVVEQKPRVIQQRVNQVLDLVGLKHKGKMFPDQISGGEQQRVAIARAIANTPKILIADEPTGNLDPDTSWEVLQVLEEVNRLGTTVIMATHHQEIVNQAKHRVIAIESGRIARDEMEGEYGYQV

SEQ ID NO: 2679 - DNA, 942 bp, Alloiococcus otitidis
  CDS (541)..(939)
ttgccattgaaagtggccggattgccagagatgaaatggagggtgagtatggttaccaagtttagaactttttttggtcacattggagaagccttccgtagtctgcgccggaatggctggatgacggtcgccgcgattgcggcagtggccatcaccctctttttggtgggatccttgcttgcctctgtcttaaacttgaacaagttggccagtgatattgaagatgatgtgaatatccgagtgtcaattgacctggcggctgaccaagacgaccaggaggctttgtgggataagatcatggctttggataatgtggcagacatgacctactctagtcgccatgaagagttggacaacattattggagtttacggtgaggactttgacctcttagaaggggatgacaacccgctttatgatgtttttatagtccacgcaactagtcctgaagccacccaggccttggctggtgaaatcgaagactttaactttgtccaagatgttaattatggaggcgctgaagctgaccgactcttcagcttgacccggaccatgcggaatgtaggttttgtggttatcggcgttttaatctttacagccgtctttttaatatccaacaccattcggattgccattttctcccgcagtacggaaattgaaatcatgcgcctagtcggggctaaaaactccttcattcgctggcccttcctgtttgaaggtgccattatcggtttagtggggtccctaatttcatcagctgtcattgcctatatttacattaacggctttgaccgcttgatgaccctcttgtcgcaaaccagctttgccctcttagcacccgaccccttcttgtatggcctacttggggtcttggttgctatcggtgtggtgattggcagtcttggttcattactatccatccgccgtttcttaaaaatttaa

SEQ ID NO: 2680 - protein, 133 aa, Alloiococcus otitidis
MTRTMRNVGFVVIGVLIFTAVFLISNTIRIAIFSRSTEIEIMRLVGAKNSFIRWPFLFEGAIIGLVGSLISSAVIAYIYINGFDRLMTLLSQTSFALLAPDPFLYGLLGVLVAIGVVIGSLGSLLSIRRFLKI

SEQ ID NO: 2681 - DNA, 942 bp, Alloiococcus otitidis; identical to SEQ ID NO: 2679
  CDS (121)..(939)

SEQ ID NO: 2682 - protein, 273 aa, Alloiococcus otitidis
MTVAAIAAVAITLFLVGSLLASVLNLNKLASDIEDDVNIRVSIDLAADQDDQEALWDKIMALDNVADMTYSSRHEELDNIIGVYGEDFDLLEGDDNPLYDVFIVHATSPEATQALAGEIEDFNFVQDVNYGGAEADRLFSLTRTMRNVGFVVIGVLIFTAVFLISNTIRIAIFSRSTEIEIMRLVGAKNSFIRWPFLFEGAIIGLVGSLISSAVIAYIYINGFDRLMTLLSQTSFALLAPDPFLYGLLGVLVAIGVVIGSLGSLLSIRRFLKI

SEQ ID NO: 2683 - DNA, 942 bp, Alloiococcus otitidis; identical to SEQ ID NO: 2679
  CDS (31)..(939)

SEQ ID NO: 2684 - protein, 303 aa, Alloiococcus otitidis
MKWRVSMVTKFRTFFGHIGEAFRSLRRNGWMTVAAIAAVAITLFLVGSLLASVLNLNKLASDIEDDVNIRVSIDLAADQDDQEALWDKIMALDNVADMTYSSRHEELDNIIGVYGEDFDLLEGDDNPLYDVFIVHATSPEATQALAGEIEDFNFVQDVNYGGAEADRLFSLTRTMRNVGFVVIGVLIFTAVFLISNTIRIAIFSRSTEIEIMRLVGAKNSFIRWPFLFEGAIIGLVGSLISSAVIAYIYINGFDRLMTLLSQTSFALLAPDPFLYGLLGVLVAIGVVIGSLGSLLSIRRFLKI

SEQ ID NO: 2685 - DNA, 942 bp, Alloiococcus otitidis; identical to SEQ ID NO: 2679
  CDS (13)..(939)

SEQ ID NO: 2686 - protein, 309 aa, Alloiococcus otitidis
MAGLPEMKWRVSMVTKFRTFFGHIGEAFRSLRRNGWMTVAAIAAVAITLFLVGSLLASVLNLNKLASDIEDDVNIRVSIDLAADQDDQEALWDKIMALDNVADMTYSSRHEELDNIIGVYGEDFDLLEGDDNPLYDVFIVHATSPEATQALAGEIEDFNFVQDVNYGGAEADRLFSLTRTMRNVGFVVIGVLIFTAVFLISNTIRIAIFSRSTEIEIMRLVGAKNSFIRWPFLFEGAIIGLVGSLISSAVIAYIYINGFDRLMTLLSQTSFALLAPDPFLYGLLGVLVAIGVVIGSLGSLLSIRRFLKI

SEQ ID NO: 2687 - DNA, 942 bp, Alloiococcus otitidis; identical to SEQ ID NO: 2679
  CDS (1)..(939)

SEQ ID NO: 2688 - protein, 313 aa, Alloiococcus otitidis
MPLKVAGLPEMKWRVSMVTKFRTFFGHIGEAFRSLRRNGWMTVAAIAAVAITLFLVGSLLASVLNLNKLASDIEDDVNIRVSIDLAADQDDQEALWDKIMALDNVADMTYSSRHEELDNIIGVYGEDFDLLEGDDNPLYDVFIVHATSPEATQALAGEIEDFNFVQDVNYGGAEADRLFSLTRTMRNVGFVVIGVLIFTAVFLISNTIRIAIFSRSTEIEIMRLVGAKNSFIRWPFLFEGAIIGLVGSLISSAVIAYIYINGFDRLMTLLSQTSFALLAPDPFLYGLLGVLVAIGVVIGSLGSLLSIRRFLKI

SEQ ID NO: 2689 - DNA, 735 bp, Alloiococcus otitidis
  CDS (19)..(732)
aggacaaggaagggatatatgatgaagaaagttttaataattgaagatgaaagctcaattgctaaactcttaagttacaatattgagcaggaaggctttgcaacggaaaccgccctagatggtcgggaaggctaccaactagccttagccaatgatttcgacatgattatcttggacttgatgctcccatccatggatgggattgatgtttgccggcagttgcgtggggagaaggttgacacacccattatcatgctgacagccaaagattcggaagtggataaaataataggcttggagatcggggctgatgactatatgaccaagccctttagtcccagagaagtcattgcccggatgaaggctgtctttagacggtatgacaaggcagttgaatctgacaataccactagccaggtctctgctaataaactgattacagtcggggatattgagattaacccggtcgaatttaaggttcgggttaaaggccaagaaatcctcctaacccctaaagaatttgacctcctactttatctagccaaacgtcaaagccggattttaagccgggagcaactccttaatgctatttggaattacgattttacaggggaaactcggattgtcgatgttcacattagccacctccgtgaaaaaatagaggaagataccaaaaatccccaatacattaaaacggctagaggctttggctacaaattcgaggcccctagatga

SEQ ID NO: 2690 - protein, 238 aa, Alloiococcus otitidis
MMKKVLIIEDESSIAKLLSYNIEQEGFATETALDGREGYQLALANDFDMIILDLMLPSMDGIDVCRQLRGEKVDTPIIMLTAKDSEVDKIIGLEIGADDYMTKPFSPREVIARMKAVFRRYDKAVESDNTTSQVSANKLITVGDIEINPVEFKVRVKGQEILLTPKEFDLLLYLAKRQSRILSREQLLNAIWNYDFTGETRIVDVHISHLREKIEEDTKNPQYIKTARGFGYKFEAPR

SEQ ID NO: 2691 - DNA, 297 bp, Alloiococcus otitidis
  CDS (4)..(294)
accttgtctttgacatgtaggttcaagctaatctgcttactttcagctttttgctgtaaaacctgcatgacatcggcaataacctggtcgacggcaactggactcaccccttgctggcttggtctttgctctagccgggataattgcaaaatatcttggaccatggaatccaaacgagtagattctttgagcataatctctagaaattcgactaaaagatctctatcctccatagccccgtccagtagggtctcactgaatccttttaaagccgtaataggggtccggagttcatga

SEQ ID NO: 2692 - protein, 97 aa, Alloiococcus otitidis
MSLTCRFKLICLLSAFCCKTCMTSAITWSTATGLTPCWLGLCSSRDNCKISWTMESKRVDSLSIISRNSTKRSLSSIAPSSRVSLNPFKAVIGVRSS

SEQ ID NO: 2693 - DNA, 1809 bp, Alloiococcus otitidis
  CDS (1)..(1806)
atgaaacagttaagaaaaagaatggtgggctactttgtcctggttaacaccatcttgtccattgctctcttggtttcctttgcctttttggctcaccggcagtttaccaaccaacaagaagagatgatccagggtcaaatgcaggtcctagttgatagcattgaccggaatccaactgccaaagagtcggagagggacttacaagaccagattgaagcagtgtcggactactttcaggagcgtatatccctgatggatgcagatggccaggtcctctttgatacagaggtcgatgaaaaccaggctgaaaaccatgctaatcgggaagaatttatggaggctgtccagtccggccaaattgaaacggcaagccggcaaagcatgtccaccgaccagtccatgtactatgccgctcaagcaatcacggaccaagagggtaacttgctgggagttgttcggatatccaataccgtcgataacttaaaccaaattgtggttttcctatctagtttactagccatttccttattgatccttattttgattactatctttatgacctattattggaccaacaagattggcaagcccattgatgaaatcaagtctgtcacccatgaattagccaataagaattacgaggcccgctacaccttgtcttcttattccgatatcaacgaattaggggactccatcaatgacctagccgaaaaccttaaagcccagttcaatgccatcaagcacaatgaccagcaactgaccaaactgttagaaaacttagtggtcggggtcatcttgattaatgaaaatcgggaaattacggtttgcaaccccatggccaatgaaattttaggggtcaatatttatggcaatattggccgggtctacagtgatattatccatagttcggatattatccaattggtggagaaggctatccggaaaaatagggcccaaaataaagaaattatcctttacttacaaaacgaaaaaacactagacgtaaatgttgtcccgattagggaagaagaagaaaagaatgattatgtccttctcttttacgatattactgaaatcaaacgactagaacaggttcggactgactttgtagctaatgcctctcatgaactccggacccctattacggctttaaaaggattcagtgagaccctactggacggggctatggaggatagagatcttttagtcgaatttctagagattatgctcaaagaatctactcgtttggattccatggtccaagatattttgcaattatcccggctagagcaaagaccaagccagcaaggggtgagtccagttgccgtcgaccaggttattgccgatgtcatgcaggttttacagcaaaaagctgaaagtaagcagattagcttgaacctacatgtcaaagacaaggttcaagttttagtcaaccaagacgagctgaagcaggtggcgatgaacttgattggcaatgctattacctataccccagaacaaggtcatgtggaaacagaaatttatcaagaaaacaatgaggctgttattaaaatagcggatgatgggattggtattccagagaaagaccaggctaggatatttgagcgcttctaccgggtggacaaggcaagaagccgaaatgctggtgggacaggtctaggtctatccattgttaaatggctagtcgagggtatggaaggccggatccaagtggaaagtcaactaggccaagggtcagccttctacctttacctccccttttaccaagatgagaaagacccggacatgtcaggcatcaaactaagctag

SEQ ID NO: 2694 - protein, 602 aa, Alloiococcus otitidis
MKQLRKRMVGYFVLVNTILSIALLVSFAFLAHRQFTNQQEEMIQGQMQVLVDSIDRNPTAKESERDLQDQIEAVSDYFQERISLMDADGQVLFDTEVDENQAENHANREEFMEAVQSGQIETASRQSMSTDQSMYYAAQAITDQEGNLLGVVRISNTVDNLNQIVVFLSSLLAISLLILILITIFMTYYWTNKIGKPIDEIKSVTHELANKNYEARYTLSSYSDINELGDSINDLAENLKAQFNAIKHNDQQLTKLLENLVVGVILINENREITVCNPMANEILGVNIYGNIGRVYSDIIHSSDIIQLVEKAIRKNRAQNKEIILYLQNEKTLDVNVVPIREEEEKNDYVLLFYDITEIKRLEQVRTDFVANASHELRTPITALKGFSETLLDGAMEDRDLLVEFLEIMLKESTRLDSMVQDILQLSRLEQRPSQQGVSPVAVDQVIADVMQVLQQKAESKQISLNLHVKDKVQVLVNQDELKQVAMNLIGNAITYTPEQGHVETEIYQENNEAVIKIADDGIGIPEKDQARIFERFYRVDKARSRNAGGTGLGLSIVKWLVEGMEGRIQVESQLGQGSAFYLYLPFYQDEKDPDMSGIKLS

SEQ ID NO: 2695 - DNA, 255 bp, Alloiococcus otitidis
  CDS (7)..(252)
cggcatgtgaccaagaagcgcaagacgaagcgcaagacgaccaaactgaagaagctgctcctgctgacgacgctggcgaagaatctagtgacgaccaagcaggtgaagaagaaggcggcgacgaagaagctgatggtgaagaagaagctggcgaccaagcagccggtgactttgactactcaagcacacttaacgcttcaactcgtgaagatgggtccggtactcgttcagcctttgttgaaatcgttggactag

SEQ ID NO: 2696 - protein, 82 aa, Alloiococcus otitidis
MTKKRKTKRKTTKLKKLLLLTTLAKNLVTTKQVKKKAATKKLMVKKKLATKQPVTLTTQAHLTLQLVKMGPVLVQPLLKSLD

SEQ ID NO: 2697 - DNA, 288 bp, Alloiococcus otitidis
  CDS (25)..(285)
attgactgcaactggtcaattgtaatgtcatcaactgggttttctgggtttacaatgacagcaataccgtcaatggcaatggattctacgccaccaaggtcagcttcttcttcttcagtaatgtcacgagaagacataccaatatcagcagtaccgtcaatagcagctgtaacaccagcgcttgaaccagtagaagcaatgtcaaaagtaacatcagggttcacagcattgtattcttcagttaatttttcaattagaggtgtaacagaggttgatccgttaatttga

SEQ ID NO: 2698 - protein, 87 aa, Alloiococcus otitidis
MSSTGFSGFTMTAIPSMAMDSTPPRSASSSSVMSREDIPISAVPSIAAVTPALEPVEAMSKVTSGFTALYSSVNFSIRGVTEVDPLI

SEQ ID NO: 2699 - DNA, 1017 bp, Alloiococcus otitidis
  CDS (4)..(1014)
cgtatgactttgaaaaaagcaacaaaatggatgtcagtactcagtgtttcgctaattttagcggcatgtgaccaagaagcgcaagacgaagcgcaagacgaccaaactgaagaagctgctcctgctgacgacgctggcgaagaatctagtgacgaccaagcaggtgaagaagaaggcggcgacgaagaagctgatggtgaagaagaagctggcgaccaagcagccggtgactttgactactcaagcacacttaacgcttcaactcgtgaagatgggtccggtactcgttcagcctttgttgaaatcgttggactagaagatgaagatggtaatgaccaaattgaccaatccatcacagtccaagatggtacgaacgctgtcatcaccggtgtacaagaagacctttacgctcttggctacgtttccgttggtgctattcaaggtaacgacgacgtgaaggccttacaagttgaaggagttgaaccaactccagaaaacatcaaagctggtgactacgaaattgctcgtgacttcaaccttgtatacggagaagatctttccgaacaagcacaagacttcctagactttgtattatctgctgaaggacaagcagttgttgaggaaaacggtgaagttcctgtggacgatggagcagaagaatttactggtggcgacgtttcaggtgaagttcaaattaacggatcaacctctgttacacctctaattgaaaaattaactgaagaatacaatgctgtgaaccctgatgttacttttgacattgcttctactggttcaagcgctggtgttacagctgctattgacggtactgctgatattggtatgtcttctcgtgacattactgaagaagaagaagctgaccttggtggcgtagaatccattgccattgacggtattgctgtcattgtaaacccagaaaacccagttgatgacattacaattgaccagttgcagtcaatttaccttaacgaaaccacaacttgggaagaatttgaataa

SEQ ID NO: 2700 - protein, 337 aa, Alloiococcus otitidis
MTLKKATKWMSVLSVSLILAACDQEAQDEAQDDQTEEAAPADDAGEESSDDQAGEEEGGDEEADGEEEAGDQAAGDFDYSSTLNASTREDGSGTRSAFVEIVGLEDEDGNDQIDQSITVQDGTNAVITGVQEDLYALGYVSVGAIQGNDDVKALQVEGVEPTPENIKAGDYEIARDFNLVYGEDLSEQAQDFLDFVLSAEGQAVVEENGEVPVDDGAEEFTGGDVSGEVQINGSTSVTPLIEKLTEEYNAVNPDVTFDIASTGSSAGVTAAIDGTADIGMSSRDITEEEEADLGGVESIAIDGIAVIVNPENPVDDITIDQLQSIYLNETTTWEEFE

SEQ ID NO: 2701 - DNA, 882 bp, Alloiococcus otitidis
  CDS (202)..(879)
caaaaagaaagggatgaacaaatgaataagccaggtgaaaaggtcatgcaaggcgttttccttgtgtctgcattgatgtccatcattgctttattgactattatttactttatttttgccaacgggcttccgattatgttccgttatggtttttttgactttatttttgggaccgaatggcgtccgtcgaataatccacccatgtatggtctcttaccgatgataacaggttccgtttttgctactcttggagcggctatcttgggtgtcccagttggtgttttaaccgccatctttatggcagagttttgcccagactggctttacaaggtcttgaaaccggctgttaccctgatggcctccattccatccattgtcatgggtttctttgccttgagactattggtcccagctgtccgggaaaacttcggcggaaatggttacagcatgttgtcagccattttaattctttccattatgattttacctaccatcattgaactgtccgaatctgccttgaagactgttccacgtacttactattcagcctccattgccatgggggcttctcatgaacggtcggttatgaacgtcctcgtacctgcagccaaatcaggtgtcttgtcctctgtcgtcttgggtattggccgggcaatcggtgaaaccatggccgttgttcttgtagctggaaaccaaccgattatgccaggtggcttactgcaagggatgagaaccttgaccattaatattgtcttggagatgggctacgctacaggagagcaccgggaagccttgattgcgacagcagttgtcttgtttgtctttatcttcattatcaatggtagcttcctcgtcattaagaataagggggataatcaataa

SEQ ID NO: 2702 - protein, 226 aa, Alloiococcus otitidis
MYGLLPMITGSVFATLGAAILGVPVGVLTAIFMAEFCPDWLYKVLKPAVTLMASIPSIVMGFFALRLLVPAVRENFGGNGYSMLSAILILSIMILPTIIELSESALKTVPRTYYSASIAMGASHERSVMNVLVPAAKSGVLSSVVLGIGRAIGETMAVVLVAGNQPIMPGGLLQGMRTLTINIVLEMGYATGEHREALIATAVVLFVFIFIINGSFLVIKNKGDNQ

SEQ ID NO: 2703 - DNA, 882 bp, Alloiococcus otitidis; identical to SEQ ID NO: 2701
  CDS (22)..(879)

SEQ ID NO: 2704 - protein, 286 aa, Alloiococcus otitidis
MNKPGEKVMQGVFLVSALMSIIALLTIIYFIFANGLPIMFRYGFFDFIFGTEWRPSNNPPMYGLLPMITGSVFATLGAAILGVPVGVLTAIFMAEFCPDWLYKVLKPAVTLMASIPSIVMGFFALRLLVPAVRENFGGNGYSMLSAILILSIMILPTIIELSESALKTVPRTYYSASIAMGASHERSVMNVLVPAAKSGVLSSVVLGIGRAIGETMAVVLVAGNQPIMPGGLLQGMRTLTINIVLEMGYATGEHREALIATAVVLFVFIFIINGSFLVIKNKGDNQ

SEQ ID NO: 2705 - DNA, 825 bp, Alloiococcus otitidis
  CDS (502)..(822)
tcaataatgcaatccaaacatgtgattcgtggaattgtctacttagctgcacttattacctttggtgttctgctttacatcatcggttttatcttaattaatggtatacctgctctaaatttggacatgtttagactgaactataccactgagaacgtgtctatgatgcctgccattattacaaccttgtatactgttatcggtacactgggtatcgcaaccccaattggtgtctttacaggattttacttagttgaatatgccgaccggtccaaccctattgtcaaattgattagtatggcaactgacatgctggcggccgtcccatccattgtctacggtctttttggtttcttgttcttcgtcaccttcctcggcctctctttctctatttcttctggtatcttaacggttaccattatgatcttgcctttgattatccgagcaactgaagaagccctcatgggtgttccaagaggcctgcgtgaagcgagttatggtttgggggctggtaagttaagaaccatctttactgttgttctaccagtggccatgccagggatcctatctggtgtcatcttggccatgggtcgggtggtcggtgaatcagctgccttgatttacaccctagggtcttcaaccaacattccaaccagtttgaccagttcaggccggaccatggctgtccacatgtatgtcctatccagtgaaggccagtatgttaatgaagcttatgcaaccgccgttgtcctctttatcctcgtcttaatcttaaacggtctatcaaccttagtcagtaataaattagctacgggaggcaaataa

SEQ ID NO: 2706 - protein, 107 aa, Alloiococcus otitidis
MGAGKLRTIFTVVLPVAMPGILSGVILAMGRVVGESAALIYTLGSSTNIPTSLTSSGRTMAVHMYVLSSEGQYVNEAYATAVVLFILVLILNGLSTLVSNKLATGGK

SEQ ID NO: 2707 - DNA, 825 bp, Alloiococcus otitidis; identical to SEQ ID NO: 2705
  CDS (157)..(822)

SEQ ID NO: 2708 - protein, 222 aa, Alloiococcus otitidis
MSMMPAIITTLYTVIGTLGIATPIGVFTGFYLVEYADRSNPIVKLISMATDMLAAVPSIVYGLFGFLFFVTFLGLSFSISSGILTVTIMILPLIIRATEEALMGVPRGLREASYGLGAGKLRTIFTVVLPVAMPGILSGVILAMGRVVGESAALIYTLGSSTNIPTSLTSSGRTMAVHMYVLSSEGQYVNEAYATAVVLFILVLILNGLSTLVSNKLATGGK

SEQ ID NO: 2709 - DNA, 825 bp, Alloiococcus otitidis; identical to SEQ ID NO: 2705
  CDS (7)..(822)

SEQ ID NO: 2710 - protein, 272 aa, Alloiococcus otitidis
MQSKHVIRGIVYLAALITFGVLLYIIGFILINGIPALNLDMFRLNYTTENVSMMPAIITTLYTVIGTLGIATPIGVFTGFYLVEYADRSNPIVKLISMATDMLAAVPSIVYGLFGFLFFVTFLGLSFSISSGILTVTIMILPLIIRATEEALMGVPRGLREASYGLGAGKLRTIFTVVLPVAMPGILSGVILAMGRVVGESAALIYTLGSSTNIPTSLTSSGRTMAVHMYVLSSEGQYVNEAYATAVVLFILVLILNGLSTLVSNKLATGGK

SEQ ID NO: 2711 - DNA, 540 bp, Alloiococcus otitidis
  CDS (22)..(537)
attagctacgggaggcaaataatgtctgaaaaaaatattaaaatgcaagttgaaaacatggatttgtactacggtgatttccaagccttgcactcagtggatttagatgtttacgaaaacgaagtaactgcttttattggcccgtctggttgtgggaaatcaaccctcattaagtccttgaaccggatgaacgacctagttccagactgccgcatcgaaggggatatccgcttagacggcaaggatatctatgctaaggggattgacctgactgaactccggaagcaagttgggatggtcttccaacaccctaaccccttccctaaaagtatctatgacaacattgcttatggtccaagaacccacggcattaaagacaagtctaaattagatgaaattgtcgaaacttctttgaagcaagcggccatttgggacgaggtcaaagaccacttagaccgaaacgctctttccatttctggtggtcagcaacaacggatctgtattgcccgtgcgattgccaatgaacccgatgtctcttga

SEQ ID NO: 2712 - protein, 172 aa, Alloiococcus otitidis
MSEKNIKMQVENMDLYYGDFQALHSVDLDVYENEVTAFIGPSGCGKSTLIKSLNRMNDLVPDCRIEGDIRLDGKDIYAKGIDLTELRKQVGMVFQHPNPFPKSIYDNIAYGPRTHGIKDKSKLDEIVETSLKQAAIWDEVKDHLDRNALSISGGQQQRICIARAIANEPDVS

SEQ ID NO: 2713 - DNA, 261 bp, Alloiococcus otitidis
  CDS (16)..(258)
acccgatgtctcttgatggacgaaccaaccagtgctttggaccctatctctacttctaaaattgaagacctagtcgaagaattgaaaagacaatacactattgtcatggttactcacaatatgcaacaagcctctcgtgtttctgaccggactgcctttttctaccaaggccggattattgagcaagacgaaactaagacactctttaccaatccaagtgaagaaagaacagaaaattacatttccggtcgatttggttaa

SEQ ID NO: 2714 - protein, 81 aa, Alloiococcus otitidis
MDEPTSALDPISTSKIEDLVEELKRQYTIVMVTHNMQQASRVSDRTAFFYQGRIIEQDETKTLFTNPSEERTENYISGRFG

SEQ ID NO: 2715 - DNA, 261 bp, Alloiococcus otitidis; identical to SEQ ID NO: 2713
  CDS (13)..(258)

SEQ ID NO: 2716 - protein, 82 aa, Alloiococcus otitidis
MMDEPTSALDPISTSKIEDLVEELKRQYTIVMVTHNMQQASRVSDRTAFFYQGRIIEQDETKTLFTNPSEERTENYISGRFG

SEQ ID NO: 2717 - DNA, 312 bp, Alloiococcus otitidis
  CDS (61)..(309)
cccataactttaattttttcgccagcttcagcaatcataccttcaatttcttcagaccgtttggatcctttaatccgaatagtggctttggcaatattaacggcgtggtcgcccatccgttccaagtcagctgatgctttcaaaatagtaatgatggtccgcaagtcagcggtcaccggttgttggagggcgataatctcaatacatttcccttctagttcaacttccagttggttgacacggtcatcgttttcaatcacttctttggctaatttcttgtcatggttgatgaaggccttaattgatttatag

SEQ ID NO: 2718 - protein, 83 aa, Alloiococcus otitidis
MDPLIRIVALAILTAWSPIRSKSADAFKIVMMVRKSAVTGCWRAIISIHFPSSSTSSWLTRSSFSITSLANFLSWLMKALIDL

SEQ ID NO: 2719 - DNA, 687 bp, Alloiococcus otitidis
  CDS (4)..(684)
aagatgagagttgcatttgacaaagaactgaatgagttgaatcgatctttttcacaattgggtaacctagttaatgaagccatctataaatcaattaaggccttcatcaaccatgacaagaaattagccaaagaagtgattgaaaacgatgaccgtgtcaaccaactggaagttgaactagaagggaaatgtattgagattatcgccctccaacaaccggtgaccgctgacttgcggaccatcattactattttgaaagcatcagctgacttggaacggatgggcgaccacgccgttaatattgccaaagccactattcggattaaaggatccaaacggtctgaagaaattgaaggtatgattgctgaagctggcgaaaaaattaaagttatgggtcaagatgttcttcaagcctttgtagagatggacaccaaggcagcccttcactttgatgaacgcgacgatgaaatcgatgagataacagataacctgaagcgaaaaagtgtcaaacgggtcgtggatgatcctgaactagcattcggagcgaccgactacaccctagttggttcatccattgagcggattggtgactacatcaccaatattgctgagtggattgtttaccacgaaaccggtaaaatcaaggaattaaatatcagccatgactatgaaaattttgaagagtaa

SEQ ID NO: 2720 - protein, 227 aa, Alloiococcus otitidis
MRVAFDKELNELNRSFSQLGNLVNEAIYKSIKAFINHDKKLAKEVIENDDRVNQLEVELEGKCIEIIALQQPVTADLRTIITILKASADLERMGDHAVNIAKATIRIKGSKRSEEIEGMIAEAGEKIKVMGQDVLQAFVEMDTKAALHFDERDDEIDEITDNLKRKSVKRVVDDPELAFGATDYTLVGSSIERIGDYITNIAEWIVYHETGKIKELNISHDYENFEE

SEQ ID NO: 2721 - DNA, 648 bp, Alloiococcus otitidis
  CDS (16)..(645)
aaagaagtgatgcccatgggaatgcacgcctattttaaaagcctatcagacctggaaaaaatctaccgttgcccggggaagtttaaatttgaagaacactcggttgccgagcactcctttaaggtgaccaagattgcccagttcttgggtacagttgaagaacaagagggcagggatattaattggcaagtcctctatgaaaaagctctcaaccatgactatgctgaaatctttatcggagatatcaaaaccccggtcaagtatgctgatcccaatcttagacaaagattggctgaagtcgaggagaagatgaccctgcattttatcgccgaagaaattcctgaacgctttcaggaggtttacaaaaaacggttgagagaagctaaggacgacagcttggaaggacaaattttatcggtagcagataaaattgacctcctctatgagtcctttggtgagatccaaaaagggaatccagaagacctttttaccgatatttaccaggaatccttggccaccatcttggagttcaaagacttggtcagcgtccagtactttatcgaagaaatcttgcctgacctacttcagggtgaattcaccaaccaggctaagctgcaagaaatttcagatgccatgctccgggactaa

SEQ ID NO: 2722 - protein, 210 aa, Alloiococcus otitidis
MGMHAYFKSLSDLEKIYRCPGKFKFEEHSVAEHSFKVTKIAQFLGTVEEQEGRDINWQVLYEKALNHDYAEIFIGDIKTPVKYADPNLRQRLAEVEEKMTLHFIAEEIPERFQEVYKKRLREAKDDSLEGQILSVADKIDLLYESFGEIQKGNPEDLFTDIYQESLATILEFKDLVSVQYFIEEILPDLLQGEFTNQAKLQEISDAMLRD

SEQ ID NO: 2723 - DNA, 648 bp, Alloiococcus otitidis; identical to SEQ ID NO: 2721
  CDS (10)..(645)

SEQ ID NO: 2724 - protein, 212 aa, Alloiococcus otitidis
MPMGMHAYFKSLSDLEKIYRCPGKFKFEEHSVAEHSFKVTKIAQFLGTVEEQEGRDINWQVLYEKALNHDYAEIFIGDIKTPVKYADPNLRQRLAEVEEKMTLHFIAEEIPERFQEVYKKRLREAKDDSLEGQILSVADKIDLLYESFGEIQKGNPEDLFTDIYQESLATILEFKDLVSVQYFIEEILPDLLQGEFTNQAKLQEISDAMLRD

SEQ ID NO: 2725 - DNA, 648 bp, Alloiococcus otitidis; identical to SEQ ID NO: 2721
  CDS (7)..(645)

SEQ ID NO: 2726 - protein, 213 aa, Alloiococcus otitidis
MMPMGMHAYFKSLSDLEKIYRCPGKFKFEEHSVAEHSFKVTKIAQFLGTVEEQEGRDINWQVLYEKALNHDYAEIFIGDIKTPVKYADPNLRQRLAEVEEKMTLHFIAEEIPERFQEVYKKRLREAKDDSLEGQILSVADKIDLLYESFGEIQKGNPEDLFTDIYQESLATILEFKDLVSVQYFIEEILPDLLQGEFTNQAKLQEISDAMLRD

SEQ ID NO: 2727 - DNA, 2853 bp, Alloiococcus otitidis
  CDS (1)..(2850)
atggcaaatgataaaatcgttgtccgtggggctcggtcccataacttaaaaaatatcgatgtcactattccgagagatgagtttgtcgtcgtgaccggcttgtctgggtctggcaaaagttctttagcctttgataccctttatgctgaagggcaaagacggtatgttgagtctctttcggcctatgccagacagtttttaggtcagatggacaaacctgatgtcgatagtatcgacggcctgagtccagccatttctattgaccaaaaaacaaccaacaacaaccctcggtcaaccgttggaacggttacagagattaatgactacttacgactgctttttgctcgggttggccaacccatttgccccaatgatggttaccccatcactagtcaatcggtagaccagatggtagacagcattttagacctacctgaccggactaaaatccaagtcttgtcccctcttgttagaggcaaaaaaggccagcacaaaaaagtcttgagtcaggtcaagtctagcggttatgtcagggtcattgtagatggggatatgcatgatattggcgacgagatcgaattaaataaaaataaaaaacatgatatctcggtcgtagttgaccgaattgtggtcaaagaaggcatccggtcccgcttgtttgactccatggaaacagccctcaagctagcagacggccaggccattgtagacgttatcgatggggaagaaatggtcttttctgagcaccattcatgcccaatctgtggctttacagtgccggatttagaaccccgcttgttttcttttaatgctccttttgggtcctgtcccgactgtgaaggtattgggaccaagttggaggttaacttggacctggtcattccagaccaaaccaagaccttgaaggaaggtgctttggctccttggaatcccatttcttctaattactacccttccatgttggaccagttttgccaagcttttagtattgatatgaacattccctaccaagacttgcctgatcaagataaaaacatggtcttgtatgggtcaggggatgaggaattcacctttgtttaccagaatcagaccggtaaggtaagggagaccaccatgtcctttgaaggggtcgtcaacaatgtctcccgccgttactttgaaacgtccagtaattttacccgccgtgtcatgggagaatacatgacggagaaggtttgcccaagttgccagggtaagcgactcaacccccaagccctcagtgtcaagattgatgaagcggattttggcgaagtcagccggctgtccattgaccaggcgttagacttttttgaccagcttgacctaggagaccaggacagggaaattgcccagcccatctgcaaggaaattaaggaccggctatctttcctaaaaaatgtcggcttggactacttgaccctgtcccgaagcgccggcaccttgtcaggtggggaagcccagcgaatccgcctggccacccaaatcgggtctaacttgtcaggggtcctctatatactggatgaaccatccatcggcctccaccaaagggataacaaccgtttgattgactccctcaaaagcatgcgagacctaggcaataccttgattgtggtagaacacgatgaagatacaatgttagcggctgaccgcttgattgacattggcccaggtgcaggagaccagggcggggaagtcatcgccaacgaccgccccgacctggttgcccaaaaccaaaattctatcaccggccaatacttgtctggcaagaaatttattcccatccccaaaaagcggcggacggctgaccaaggagctattgctgtcagaggggctagggaaaataatttaaaagggatcgatgttgactttcctttgggtcgcttgaacctggttactggtgtatccggttcaggcaagtcttccctggtcaacggtgtcttaaaatctgccttagctagggcagtgggtcggtctaaggaaaggatcggtaaggttgaccaggtgtctggttacgagggaattgacaaggtggttgacattgaccagtcccctattggccggactccccggtcaaacccagctacctacaccagtgtctttgatgacatccgggacctctttgcttccactaatgaagccaaggttcgtggttacaataagggccggttttcctttaatgtgaaaggtggccgttgtgaagcctgcaagggtgacgggattttgaccatcgaaatgcacttcttaccggacgtctacgttccttgtgaggtctgcaaggggactcggtataactccgaaaccctggaagtggaatacaagggaaaaaatatctcccaagtcttggacatgactgtagcggatgcggctgaattttttgaagctattcccaaaattaaacgtaaacttgatactattatcgatgttggcttgggctatattaccctaggccaacctgccccaactctttctggtggcgaggctcagcggatgaagctagcttctgaacttcaaaaacgtcaaaacggccacaacttttatatattggatgaaccaacaactggtcttcataccgacgacattgcccggcttttgaccgtcctccagcgcttagtggatgcaggcaatactgttgtgattattgaacacaacctggacgtgatcaaggtggccgactacattattgacttaggaccagaaggcggtgctggaggtggccaggttatcgcaactgggactcccgaagaaattgcccaggttgaagatagttatactggtcactatctcaaggctatcttagaccgagacttggcccggatgcaggcagctaagaagtaa

SEQ ID NO: 2728 - protein, 950 aa, Alloiococcus otitidis
MANDKIVVRGARSHNLKNIDVTIPRDEFVVVTGLSGSGKSSLAFDTLYAEGQRRYVESLSAYARQFLGQMDKPDVDSIDGLSPAISIDQKTTNNNPRSTVGTVTEINDYLRLLFARVGQPICPNDGYPITSQSVDQMVDSILDLPDRTKIQVLSPLVRGKKGQHKKVLSQVKSSGYVRVIVDGDMHDIGDEIELNKNKKHDISVVVDRIVVKEGIRSRLFDSMETALKLADGQAIVDVIDGEEMVFSEHHSCPICGFTVPDLEPRLFSFNAPFGSCPDCEGIGTKLEVNLDLVIPDQTKTLKEGALAPWNPISSNYYPSMLDQFCQAFSIDMNIPYQDLPDQDKNMVLYGSGDEEFTFVYQNQTGKVRETTMSFEGVVNNVSRRYFETSSNFTRRVMGEYMTEKVCPSCQGKRLNPQALSVKIDEADFGEVSRLSIDQALDFFDQLDLGDQDREIAQPICKEIKDRLSFLKNVGLDYLTLSRSAGTLSGGEAQRIRLATQIGSNLSGVLYILDEPSIGLHQRDNNRLIDSLKSMRDLGNTLIVVEHDEDTMLAADRLIDIGPGAGDQGGEVIANDRPDLVAQNQNSITGQYLSGKKFIPIPKKRRTADQGAIAVRGARENNLKGIDVDFPLGRLNLVTGVSGSGKSSLVNGVLKSALARAVGRSKERIGKVDQVSGYEGIDKVVDIDQSPIGRTPRSNPATYTSVFDDIRDLFASTNEAKVRGYNKGRFSFNVKGGRCEACKGDGILTIEMHFLPDVYVPCEVCKGTRYNSETLEVEYKGKNISQVLDMTVADAAEFFEAIPKIKRKLDTIIDVGLGYITLGQPAPTLSGGEAQRMKLASELQKRQNGHNFYILDEPTTGLHTDDIARLLTVLQRLVDAGNTVVIIEHNLDVIKVADYIIDLGPEGGAGGGQVIATGTPEEIAQVEDSYTGHYLKAILDRDLARMQAAKK

SEQ ID NO: 2729 - DNA, 297 bp, Alloiococcus otitidis
  CDS (37)..(294)
tcgtttaaactgtcgatccgttctgacttgaccagcatgtcactggccgccgcttcaatacctgcttcagcttcttccttgcttccactgcttgcaaagtctctattggcggatttttccccttcttttcgagccaaaccttcgattaagtccaaagcttctttagttgtcaatacacccgctttaacaagttcaataatccggtctttttcagtcattttattccctcctggttgggcttttaactggcttctttacttagacctattatctaacagaacgacagctttgtcatag

SEQ ID NO: 2730 - protein, 86 aa, Alloiococcus otitidis
MSLAAASIPASASSLLPLLAKSLLADFSPSFRAKPSIKSKASLVVNTPALTSSIIRSFSVILFPPGWAFNWLLYLDLLSNRTTALS

SEQ ID NO: 2731 - DNA, 297 bp, Alloiococcus otitidis; identical to SEQ ID NO: 2729
  CDS (28)..(294)

SEQ ID NO: 2732 - protein, 89 aa, Alloiococcus otitidis
MTSMSLAAASIPASASSLLPLLAKSLLADFSPSFRAKPSIKSKASLVVNTPALTSSIIRSFSVILFPPGWAFNWLLYLDLLSNRTTALS

SEQ ID NO: 2733 - DNA, 738 bp, Alloiococcus otitidis
  CDS (244)..(735)
gtcgaccgtttttcaaaggcctcttctagtgagctgttaaatttaccaaacatggtgatagaggcttttatctcgatatgcgctaccggaccttcttggatcactaggtctccattggcatttttaatatcaaaaatagttggctggctatcctcaatttgccactccttgttaaaagagttggaaacaaggttgaagactctgaggtctggtttatgccattcaaaatggtccaaaaagtccttggaactgcctacgatatccttgactaccttattaatgttttcacccgcttggttgacctttttactggtttcttctttccagtcctcagaaaattggaactggtcctttaaattttccagctggtcggtaaaccactgggaatcgctaccgtcaacctctttgaccaaactgtcccgttctttaaccaaacgagcaatttccttagataaagctactaactggctttttaattccttgatttcagcctgcttgtcttgggaaataacttcctggtcttggatatggctttctaggtctttaatttcctcattaatctggtctaattctttggaattatccacttcatctaggtctttgatcaaatctttttcgacatgtaagtctttaaaatcttgtcgcaaattttttagcaggtcttcttcctggtttgcctctgcttcttctaattcagcttgcaagtcgcttaagtcagactcaagttcctggatttga

SEQ ID NO: 2734 - protein, 164 aa, Alloiococcus otitidis
MELPTISLTTLLMFSPAWLTFLLVSSFQSSENWNWSFKFSSWSVNHWESLPSTSLTKLSRSLTKRAISLDKATNWLFNSLISACLSWEITSWSWIWLSRSLISSLIWSNSLELSTSSRSLIKSFSTCKSLKSCRKFFSRSSSWFASASSNSACKSLKSDSSSWI

SEQ ID NO: 2735 - DNA, 738 bp, Alloiococcus otitidis; identical to SEQ ID NO: 2733
  CDS (52)..(735)

SEQ ID NO: 2736 - protein, 228 aa, Alloiococcus otitidis
MVIEAFISICATGPSWITRSPLAFLISKIVGWLSSICHSLLKELETRLKTLRSGLCHSKWSKKSLELPTISLTTLLMFSPAWLTFLLVSSFQSSENWNWSFKFSSWSVNHWESLPSTSLTKLSRSLTKRAISLDKATNWLFNSLISACLSWEITSWSWIWLSRSLISSLIWSNSLELSTSSRSLIKSFSTCKSLKSCRKFFSRSSSWFASASSNSACKSLKSDSSSWI

SEQ ID NO: 2737 - DNA, 1614 bp, Alloiococcus otitidis
  CDS (37)..(1611)
agaagccagttaaaagcccaaccaggagggaataaaatgactgaaaaagaccggattattgaacttgttaaagcgggtgtattgacaactaaagaagctttggacttaatcgaaggtttggctcgaaaagaaggggaaaaatccgccaatagagactttgcaagcagtggaagcaaggaagaagctgaagcaggtattgaagcggcggccagtgacatgctggtcaagtcagaacggatcgacagtttaaacgatcaaatccaggaacttgagtctgacttaagcgacttgcaagctgaattagaagaagcagaggcaaaccaggaagaagacctgctaaaaaatttgcgacaagattttaaagacttacatgtcgaaaaagatttgatcaaagacctagatgaagtggataattccaaagaattagaccagattaatgaggaaattaaagacctagaaagccatatccaagaccaggaagttatttcccaagacaagcaggctgaaatcaaggaattaaaaagccagttagtagctttatctaaggaaattgctcgtttggttaaagaacgggacagtttggtcaaagaggttgacggtagcgattcccagtggtttaccgaccagctggaaaatttaaaggaccagttccaattttctgaggactggaaagaagaaaccagtaaaaaggtcaaccaagcgggtgaaaacattaataaggtagtcaaggatatcgtaggcagttccaaggactttttggaccattttgaatggcataaaccagacctcagagtcttcaaccttgtttccaactcttttaacaaggagtggcaaattgaggatagccagccaactatttttgatattaaaaatgccaatggagacctagtgatccaagaaggtccggtagcgcatatcgagataaaagcctctatcaccatgtttggtaaatttaacagctcactagaagaggcctttgaaaaacggtcgacctaccggctgacagaagattccttgaaactacacatccccaacaaaagggtccaggctgatattcaaatcacccttcccgaaggcagttatgactacttgtcagtcaatgttttaaatggagacctaagcttgaaggacttaacctttagtgacctctaccttaaagcaactaagggggacattagcctagaccaagttaaggcctctatggtggaggtcaaggggacatctggggacatcaaggtcttggatagcgacttgcaagacttaatcatttcctctgttaatggggatatcaaggcggatggccggcttgcttcctccagcttggcaacaactcttggtgatatacgcctaagtttgtacggtccaagtccagtccaggtggatacctccactgtttatggggatgttaaaattgcccttcccctagataaagacttagaggtagaaggcaagtccaactttggtaaagtctacagccggctcagccaaaccaagatagaagccagtgacggcaaggactcctctgtcacccttagccggcttggtcagggagaggccatccgggtcaaggccaaaacaacccaaggaaacattttgctaaaagattctgaataa

SEQ ID NO: 2738 - protein, 525 aa, Alloiococcus otitidis
MTEKDRIIELVKAGVLTTKEALDLIEGLARKEGEKSANRDFASSGSKEEAEAGIEAAASDMLVKSERIDSLNDQIQELESDLSDLQAELEEAEANQEEDLLKNLRQDFKDLHVEKDLIKDLDEVDNSKELDQINEEIKDLESHIQDQEVISQDKQAEIKELKSQLVALSKEIARLVKERDSLVKEVDGSDSQWFTDQLENLKDQFQFSEDWKEETSKKVNQAGENINKVVKDIVGSSKDFLDHFEWHKPDLRVFNLVSNSFNKEWQIEDSQPTIFDIKNANGDLVIQEGPVAHIEIKASITMFGKFNSSLEEAFEKRSTYRLTEDSLKLHIPNKRVQADIQITLPEGSYDYLSVNVLNGDLSLKDLTFSDLYLKATKGDISLDQVKASMVEVKGTSGDIKVLDSDLQDLIISSVNGDIKADGRLASSSLATTLGDIRLSLYGPSPVQVDTSTVYGDVKIALPLDKDLEVEGKSNFGKVYSRLSQTKIEASDGKDSSVTLSRLGQGEAIRVKAKTTQGNILLKDSE

SEQ ID NO: 2739 - DNA, 270 bp, Alloiococcus otitidis
  CDS (1)..(267)
ttgtgttcaagagaatcctctgccaccatttcactaaaaatcactccaatcatcttcgtctacttcttccacatcttcagcttgttttcgttccctatttctatagtctcttctattgaccttgtcaaattcttgtcgaattttttcccttcttttccgaaaggtgacttcttcgggttcatctggcatgatgatggccaaggcaatgtagatcacgataaaggtccccatggatccaacagccaagacgaagaaaatcacacgaactaa

SEQ ID NO: 2740 - protein, 89 aa, Alloiococcus otitidis
MCSRESSATISLKITPIIFVYFFHIFSLFSFPISIVSSIDLVKFLSNFFPSFPKGDFFGFIWHDDGQGNVDHDKGPHGSNSQDEENHTN

SEQ ID NO: 2741 - DNA, 372 bp, Alloiococcus otitidis
  CDS (40)..(369)
gaacccgcctcttgtttgagggtaaattcatatggaagggtggtaggtgtgaaaaagttacaaaaatcaaaagataatgaaatcctctttggtgttttaggaggtattgcggaatactttgaaattgaccccgtcttagttcgtgtgattttcttcgtcttggctgttggatccatggggacctttatcgtgatctacattgccttggccatcatcatgccagatgaacccgaagaagtcacctttcggaaaagaagggaaaaaattcgacaagaatttgacaaggtcaatagaagagactatagaaatagggaacgaaaacaagctgaagatgtggaagaagtagacgaagatgattggagtgatttttag

SEQ ID NO: 2742 - protein, 110 aa, Alloiococcus otitidis
MVGVKKLQKSKDNEILFGVLGGIAEYFEIDPVLVRVIFFVLAVGSMGTFIVIYIALAIIMPDEPEEVTFRKRREKIRQEFDKVNRRDYRNRERKQAEDVEEVDEDDWSDF

SEQ ID NO: 2743 - DNA, 372 bp, Alloiococcus otitidis; identical to SEQ ID NO: 2741
  CDS (16)..(369)

SEQ ID NO: 2744 - protein, 118 aa, Alloiococcus otitidis
MRVNSYGRVVGVKKLQKSKDNEILFGVLGGIAEYFEIDPVLVRVIFFVLAVGSMGTFIVIYIALAIIMPDEPEEVTFRKRREKIRQEFDKVNRRDYRNRERKQAEDVEEVDEDDWSDF

SEQ ID NO: 2745 - DNA, 348 bp, Alloiococcus otitidis
  CDS (43)..(345)
tttttagtgaaatggtggcagaggattctcttgaacacaatcatgtttttggccttggctggcttttttaagggctttgttatagactctatctttacagccctcttagccgctgtcatttttggcattttaaataccctggtcaagccgatcttagtccttctttccctgccgataacggtcttaaccctgggcatcttttatttcctgatcaatggcttgattttatacatgacgtctgccttggtgtccgggtttacaatttcatcttatggcttggccttccttctttccttaatcatatccctagtcaattcctactttacccggcctgtctactattattag

SEQ ID NO: 2746 - protein, 101 aa, Alloiococcus otitidis
MFLALAGFFKGFVIDSIFTALLAAVIFGILNTLVKPILVLLSLPITVLTLGIFYFLINGLILYMTSALVSGFTISSYGLAFLLSLIISLVNSYFTRPVYYY

SEQ ID NO: 2747 - DNA, 348 bp, Alloiococcus otitidis; identical to SEQ ID NO: 2745
  CDS (7)..(345)

SEQ ID NO: 2748 - protein, 113 aa, Alloiococcus otitidis
MKWWQRILLNTIMFLALAGFFKGFVIDSIFTALLAAVIFGILNTLVKPILVLLSLPITVLTLGIFYFLINGLILYMTSALVSGFTISSYGLAFLLSLIISLVNSYFTRPVYYY

SEQ ID NO: 2749 - DNA, 1002 bp, Alloiococcus otitidis
  CDS (64)..(999)
aatgacctcacatgtggtaagataggatggactatagctttcttttacttggaggaaggaacaatgactaaatttgtgacagtgggggacctggtggaaggtgttaatgcagccagggtgatctcaggccaagactttttagacaggaagattaagatcacagatgtttcaagaccggccttagaactgacaggctactttaactattatgccaatgaaagggttcaggtcttgggtcggaccgagatatcttttatggcgagaatgtcacctgaagagcggaaaatcatctgcaaacgtttgtcaaccgaccagaccccttgctacttggtttccagggacttagagccgcctgaagaattagtagaagttgcgaatagccaaggaattcctatcttaggaagttataagccgactacccggatcatggctaatatgactaattatttagagaaaaagttggctgaccgcatgtcccagcacggtgttttagtggacgtttacgggatggggaccttgatcattggtgattccggtattggcaagtcagaaacagccttggaattggtcaaacggggccaccgcctcatagcagatgaccgggtagacttgtacatgcttgacgaaagtcggattgttggcgagccacctgaaatcttgcggaatttaattgaaatccggggcatcggggtgattgatgtcgtcaacttgtttggtcttggtgcgattcgtccccgcaagaaggtagacttggtcattaacctggaaccttggaatgaggaccggcattatgaccgaattggggatagtatggagaagatgaaattcttcaatgtggatgtccccatggtaactgtcccagtccgggttgggcggaacttgtctattatcattgaaatagccgccatgaaccagcgggctaagaacctgggttatgatgccgttgaaaccttccagcaaaacctaactgaattaatgaaacggaattccactgacctatag

SEQ ID NO: 2750 - protein, 312 aa, Alloiococcus otitidis
MTKFVTVGDLVEGVNAARVISGQDFLDRKIKITDVSRPALELTGYFNYYANERVQVLGRTEISFMARMSPEERKIICKRLSTDQTPCYLVSRDLEPPEELVEVANSQGIPILGSYKPTTRIMANMTNYLEKKLADRMSQHGVLVDVYGMGTLIIGDSGIGKSETALELVKRGHRLIADDRVDLYMLDESRIVGEPPEILRNLIEIRGIGVIDVVNLFGLGAIRPRKKVDLVINLEPWNEDRHYDRIGDSMEKMKFFNVDVPMVTVPVRVGRNLSIIIEIAAMNQRAKNLGYDAVETFQQNLTELMKRNSTDL

SEQ ID NO: 2751 - DNA, 1002 bp, Alloiococcus otitidis; identical to SEQ ID NO: 2749
  CDS (49)..(999)

SEQ ID NO: 2752 - protein, 317 aa, Alloiococcus otitidis
MEEGTMTKFVTVGDLVEGVNAARVISGQDFLDRKIKITDVSRPALELTGYFNYYANERVQVLGRTEISFMARMSPEERKIICKRLSTDQTPCYLVSRDLEPPEELVEVANSQGIPILGSYKPTTRIMANMTNYLEKKLADRMSQHGVLVDVYGMGTLIIGDSGIGKSETALELVKRGHRLIADDRVDLYMLDESRIVGEPPEILRNLIEIRGIGVIDVVNLFGLGAIRPRKKVDLVINLEPWNEDRHYDRIGDSMEKMKFFNVDVPMVTVPVRVGRNLSIIIEIAAMNQRAKNLGYDAVETFQQNLTELMKRNSTDL

SEQ ID NO: 2753 - DNA, 882 bp, Alloiococcus otitidis
  CDS (19)..(879)
aagagaaaaggagaccctatgcaggaattgttagctgttattgatcccatcgcatttgaattaggccctatatcagtggcatggtacggggtgattatagccttggccatgctcctagctgtctttttggcctctcgagaagccaaaaaattgggcatggatagtgatatagttattgacttagccttttggattatcccctttggcattatcggagcccggatttattatgtcttatttgaattggattcttatatccaagaccccatccggatcctctttatatgggaagggggcctggccatctatggggggattattgcgggcttctttaccattctatggtttgcccataaggaaaaactagacatttggctcctctttgacctagcagccccatccttgttgatagcccaatccattggccgttggggtaactttgttaaccaggaggcctttgggggcgaagtttcccggggatttttggaaagcttatatctacctgaatttatcatagagggaatgaacattaatggggcctaccaccatcctaccttcctttatgaatctatcctaaccctagccggctttatcatcgcccttatcctgcgccggaaagggaatttattgcggggggaattgatttccttctaccttatttggtacggaactggccgcttctttattgaaggaatgcgaacagacagcctctacattggtcccctccgtgtcagccaagttttgtcagccctcatcgttctccttggaattgggataatcctctatcgtcgcttttacctttaccctagaccgccatactacagtgaaggagttaaaccagaaattgactttgccaagaaaaaagcagcctacgaccaatag

SEQ ID NO: 2754 - protein, 287 aa, Alloiococcus otitidis
MQELLAVIDPIAFELGPISVAWYGVIIALAMLLAVFLASREAKKLGMDSDIVIDLAFWIIPFGIIGARIYYVLFELDSYIQDPIRILFIWEGGLAIYGGIIAGFFTILWFAHKEKLDIWLLFDLAAPSLLIAQSIGRWGNFVNQEAFGGEVSRGFLESLYLPEFIIEGMNINGAYHHPTFLYESILTLAGFIIALILRRKGNLLRGELISFYLIWYGTGRFFIEGMRTDSLYIGPLRVSQVLSALIVLLGIGIILYRRFYLYPRPPYYSEGVKPEIDFAKKKAAYDQ

SEQ ID NO: 2755 - DNA, 1032 bp, Alloiococcus otitidis
  CDS (49)..(1029)
ggggtgatttgtgtgattaaccaagctcaaccagaaaaagtaaccgtcttgggtgccggctcttggggaacagccctggccaatgttttgatcgaaaatggccatgatgtattactctggacccggagctctgaccaggcccaggagatcaaccaagaaaagactaaccaccattatctcaaagatactcacttacctgattcgattcgagcgaccagtgacttaactgaggcagtcggccatagtgacattttattatttgttgtccccacttcagctatccgaccagtagcccgagacctggctggcttactgactaaagaagtcagcgttatccatgcagctaagggtttggaagggggcagttacttgcggatttcccagattttagcccaggagttgcccgctgacttggttaaaggcattgttgccttgtcaggtcccagccatgctgaagaagtggtcaagcatgacttgacttctattacggcagccagtgaaaacccagaccaggcgagatttacccaaaaactctttatcaatgactacttcagggtctacaccaacccggatattatcggagtagagattggggcagcccttaaaaatattattgctttagggtctggcatcatcgatggttacggctatggggataatgcccgggccggtttgataacccgtggcctggccgaaatttcccgtctgggccaagccattggggcccaagccctaacctttattggcttaagtggggtaggggacttaatcgtcacctgctccagcccccattcaagaaattaccaggctggtcgcctgctaggccaaggtcaagacttagagtcagccttggactcgatcggcatggtggtcgaaggggtctacaccacccaggccgcctatgacctatcccaaaaaatggggatcgaaatgcccatcacagaagccatttaccagattttatatgatgacttgtcagttggccaagccattacttcattaatgaaccgcaggggtaaatcagaagcttaa

SEQ ID NO: 2756 - protein, 327 aa, Alloiococcus otitidis
MGAGSWGTALANVLIENGHDVLLWTRSSDQAQEINQEKTNHHYLKDTHLPDSIRATSDLTEAVGHSDILLFVVPTSAIRPVARDLAGLLTKEVSVIHAAKGLEGGSYLRISQILAQELPADLVKGIVALSGPSHAEEVVKHDLTSITAASENPDQARFTQKLFINDYFRVYTNPDIIGVEIGAALKNIIALGSGIIDGYGYGDNARAGLITRGLAEISRLGQAIGAQALTFIGLSGVGDLIVTCSSPHSRNYQAGRLLGQGQDLESALDSIGMVVEGVYTTQAAYDLSQKMGIEMPITEAIYQILYDDLSVGQAITSLMNRRGKSEA

SEQ ID NO: 2757 - DNA, 1032 bp, Alloiococcus otitidis; identical to SEQ ID NO: 2755
  CDS (13)..(1029)

SEQ ID NO: 2758 - protein, 339 aa, Alloiococcus otitidis
MINQAQPEKVTVLGAGSWGTALANVLIENGHDVLLWTRSSDQAQEINQEKTNHHYLKDTHLPDSIRATSDLTEAVGHSDILLFVVPTSAIRPVARDLAGLLTKEVSVIHAAKGLEGGSYLRISQILAQELPADLVKGIVALSGPSHAEEVVKHDLTSITAASENPDQARFTQKLFINDYFRVYTNPDIIGVEIGAALKNIIALGSGIIDGYGYGDNARAGLITRGLAEISRLGQAIGAQALTFIGLSGVGDLIVTCSSPHSRNYQAGRLLGQGQDLESALDSIGMVVEGVYTTQAAYDLSQKMGIEMPITEAIYQILYDDLSVGQAITSLMNRRGKSEA

SEQ ID NO: 2759 - DNA, 1032 bp, Alloiococcus otitidis; identical to SEQ ID NO: 2755
  CDS (4)..(1029)

SEQ ID NO: 2760 - protein, 342 aa, Alloiococcus otitidis
MICVINQAQPEKVTVLGAGSWGTALANVLIENGHDVLLWTRSSDQAQEINQEKTNHHYLKDTHLPDSIRATSDLTEAVGHSDILLFVVPTSAIRPVARDLAGLLTKEVSVIHAAKGLEGGSYLRISQILAQELPADLVKGIVALSGPSHAEEVVKHDLTSITAASENPDQARFTQKLFINDYFRVYTNPDIIGVEIGAALKNIIALGSGIIDGYGYGDNARAGLITRGLAEISRLGQAIGAQALTFIGLSGVGDLIVTCSSPHSRNYQAGRLLGQGQDLESALDSIGMVVEGVYTTQAAYDLSQKMGIEMPITEAIYQILYDDLSVGQAITSLMNRRGKSEA

SEQ ID NO: 2761 - DNA, 456 bp, Alloiococcus otitidis
  CDS (28)..(453)
gagtatttgaccaggaaggaggattggatggcacaagcaaaggataagattatccgtatcaacccatcagcacccttttactttgagcgagcctttgatgcctaccaccagtccgatttagacaaaggaattaagtattttaaaagagggatcagcctagctgacaacccctatgaagaacattacggggccatccagcttgccttaatttaccagcaccagggagaattccaaaagtcttacgacctggtccaggacttgcttgacaaaagtggcaagctacaagctgacctctattattaccaagctgtgaattgttcctatttaaaagattaccgggaagccaagcagcacttagagacttttatcaatttattggaccaaagaccaggccaggattccccttaccggagtgaagcagaagacatgcttgtttacttggcaaacttggattag

SEQ ID NO: 2762 - protein, 142 aa, Alloiococcus otitidis
MAQAKDKIIRINPSAPFYFERAFDAYHQSDLDKGIKYFKRGISLADNPYEEHYGAIQLALIYQHQGEFQKSYDLVQDLLDKSGKLQADLYYYQAVNCSYLKDYREAKQHLETFINLLDQRPGQDSPYRSEAEDMLVYLANLD

SEQ ID NO: 2763 - DNA, 456 bp, Alloiococcus otitidis; identical to SEQ ID NO: 2761
  CDS (7)..(453)

SEQ ID NO: 2764 - protein, 149 aa, Alloiococcus otitidis
MTRKEDWMAQAKDKIIRINPSAPFYFERAFDAYHQSDLDKGIKYFKRGISLADNPYEEHYGAIQLALIYQHQGEFQKSYDLVQDLLDKSGKLQADLYYYQAVNCSYLKDYREAKQHLETFINLLDQRPGQDSPYRSEAEDMLVYLANLD

SEQ ID NO: 2765 - DNA, 993 bp, Alloiococcus otitidis
  CDS (19)..(990)
aggagtcgaagatcgagaatggattcagaaaatatctatgatgttgttgttgctggatcaggacctggtggcatgactgcggccctttatgcttcaagagctaatatgactaccttgatccttgaaagaggagcaccaggaggccagttaatcaatacggctgaaattgaaaattacactggatacaagtcgattccaggaccagacctggctagcaagatgtatgaaggcgccctcaattttggggccgactaccaatatggggatatacaagacctgatcgaccatggttcctacaaggaaattaaggcttcaggcaagtcttattttgccagagcggtcattattgcaaccggtgctgagcataaaaaattaggggtccctggtgaagaaagctttaacggccggggggtttcctactgtgccgtttgtgacggagcctttttcaagggcaaggatattgttgtagtcggcggaggagactctgcggttgaagaagggaactaccttacccaatttgccgaccaagtctctattatccaccgccgggatgaattgcgggcccaaaaagtcttgcaagaccgggccttcaacaatgacaagattgattttatttgggactctgtggtcgaagaaatcatgggagatgacagtgtgtctaaggtccgcctccgtaatgtcaagactggagaagttagtgaattagacaccaatgggacctttatctacattggcctagtccctaacagccaagcttttgctgggctaggtatttgtgacgaccaaggctgggtcattacgaacgaaaaaatggaaagcaaggtcccaggtatctttgccatcggggatgtccggcaaactgtcttgcgccaagtagccactgcagtaggcgacggggcagttgctggcaatgaagcctttaattatgtagaggaatttaaggattccttgaccaaagaaaaaattagccaaagtatcaaggaaagtgaatag

SEQ ID NO: 2766 - protein, 324 aa, Alloiococcus otitidis
MDSENIYDVVVAGSGPGGMTAALYASRANMTTLILERGAPGGQLINTAEIENYTGYKSIPGPDLASKMYEGALNFGADYQYGDIQDLIDHGSYKEIKASGKSYFARAVIIATGAEHKKLGVPGEESFNGRGVSYCAVCDGAFFKGKDIVVVGGGDSAVEEGNYLTQFADQVSIIHRRDELRAQKVLQDRAFNNDKIDFIWDSVVEEIMGDDSVSKVRLRNVKTGEVSELDTNGTFIYIGLVPNSQAFAGLGICDDQGWVITNEKMESKVPGIFAIGDVRQTVLRQVATAVGDGAVAGNEAFNYVEEFKDSLTKEKISQSIKESE

SEQ ID NO: 2767 - DNA, 1725 bp, Alloiococcus otitidis
  CDS (1)..(1722)
atgacttggaaggatacatatcaaagctggctgtcttttgaccagctagacgcagacctaaaagcagacctagaccagttagaagatgactcagaccaactagaggacgccttttataaggccttggaatttggaactgctggcatgcggggcttgatggggccagggaccaaccggatgaacatttacactgtccgtcaagccagccaggggttaagtaactacttgctcgaccgcttcgacgatgccaagcaaaggggtgtagcaatcggctatgactcccgtcaccagtcccaagcctttgcttttgaggcagccaagaccttggggcagtcggggattaaaagttatgtctttgaatcgatttgccccacccctgaactttcctttgcggtccgtcattttaaatgccgggctgggatcatggtgaccgctagccacaacccaccggcctataatggttacaaggtttatggcgatgacggtggccagctcctccctcaagcagcagaccagttaacagattttgtcaaccaggtccaagaccccttgtcagtccaagtagcccaaaaggataaattaatccaggctggcctcctcaatatagtagggcctagagtcgacaagtcttacctggaaatgatgcagtcagtcacactcaaccctgatatggttgaagattatgccaatgacttgaccatcgtctacaccccccttcatggtacagggcaaaaattggtcaagaaagccctctacaatgccggcttccaaaatgtttatgatgttgacagtcaaaaagacccagacccagacttttcgacggtggaaagccccaaccccgaaacagagggggcctttgccgaagcaataaaggtggggaccaagcaggatgcagatgttttgatcgcttctgaccctgatgctgaccgcctaggtgtagccgtcaaaacagttaaagggtcttaccgggtcttgtctggtaatgagatcggtagtctcctgacccactatattttaaaagcccaattccacaacaaactcctacctaaataccccgtcgtgattaagtccattgtgtcttcagacttgccagaccgaattgcagactcctttggggctagggtagagactgttttaacgggctttaagtatatagctgaccggatcaagttccataatgagtctgatgagaccagctttatgtttggttttgaagaaagtaatggctacttgtcccgctcctttgtcagagacaaggatgcggtccaagccagtgtattagtggcagaaatggccctttattataaattgcaagatttttcactggtggatgccctcttcaacctctacaaccactatggccactttaaagatacggttttttccctcagtttagaagggaagaaggggcaagacaagattgaccagatcatggaaaaattccggcaaattccgctgaaggactttgcaggctttaaagtcaaggctaaggaagattatctatctagccaaagaagcttggctgaaggtggcacagaagatattgacctgcctcagtccaatgtgttgaagttccaaatgacagatgggtcatggctagcagtccgaccttctgggaccgaacccaagattaagtgttacttatctgctacggatgggtcgaagttagaagtggaccgcaaattagaacgcttagagcaggcagcccggcaattgatggattaa

SEQ ID NO: 2768 - protein, 574 aa, Alloiococcus otitidis
MTWKDTYQSWLSFDQLDADLKADLDQLEDDSDQLEDAFYKALEFGTAGMRGLMGPGTNRMNIYTVRQASQGLSNYLLDRFDDAKQRGVAIGYDSRHQSQAFAFEAAKTLGQSGIKSYVFESICPTPELSFAVRHFKCRAGIMVTASHNPPAYNGYKVYGDDGGQLLPQAADQLTDFVNQVQDPLSVQVAQKDKLIQAGLLNIVGPRVDKSYLEMMQSVTLNPDMVEDYANDLTIVYTPLHGTGQKLVKKALYNAGFQNVYDVDSQKDPDPDFSTVESPNPETEGAFAEAIKVGTKQDADVLIASDPDADRLGVAVKTVKGSYRVLSGNEIGSLLTHYILKAQFHNKLLPKYPVVIKSIVSSDLPDRIADSFGARVETVLTGFKYIADRIKFHNESDETSFMFGFEESNGYLSRSFVRDKDAVQASVLVAEMALYYKLQDFSLVDALFNLYNHYGHFKDTVFSLSLEGKKGQDKIDQIMEKFRQIPLKDFAGFKVKAKEDYLSSQRSLAEGGTEDIDLPQSNVLKFQMTDGSWLAVRPSGTEPKIKCYLSATDGSKLEVDRKLERLEQAARQLMD

SEQ ID NO: 2769 - DNA, 912 bp, Alloiococcus otitidis
  CDS (22)..(909)
ttgactagaaaggagacacttatgggtgaacaaatagaagtagtcatcattacaggaatgagcggggctggcaagacggttgcggtccaatgcctggaagacttgggttattattgtattgataatatgccccctgagctcctgcccaccttttgggacttgacccggaaatcggcccagcttaccaaggtggccttggtcatggacctcaggatgcgagatttcttttcccatatgaaggattccctggctaaaattgaaaacaccccctatattgtcaagcggatggtctttttggactgcagtgatgaagaattaatcaaccgctataaggaatcgcgccggtcccaccccctagcttatgatgaccgcttgattgaggggatcaaaaaagaacgtcagtctttggccagttttcgccagcaatctcaagtggtgatcgacaccagtgatttgacccctagacaattacgggaaaaatttgtaaaattgtttgggcagtctgccgaaaataaattgttccgggttgagctggtctcctttggctttaagtacggcatcccaacagatgctgatatagtcatggatgtccgctttttgcccaacccccactacctacctgaattgaaagaccagactggcctagatgaatcggtctatgattacgtcatgcaacaaccggaaacagaacagtttttccaaaaatttatcgacctattgacctttaaccttcctggctataaaaaggaagggaaaaccagcctaacagtggctattggttgtactggggggcggcaccggtctgtagctttgaccgaacgcgttgccaaaactttgtctggcgacggttatgacgtgaatgtatctcaccgcgacaaggataaagacaaggagtccgtaattcgatcatga

SEQ ID NO: 2770 - protein, 296 aa, Alloiococcus otitidis
MGEQIEVVIITGMSGAGKTVAVQCLEDLGYYCIDNMPPELLPTFWDLTRKSAQLTKVALVMDLRMRDFFSHMKDSLAKIENTPYIVKRMVFLDCSDEELINRYKESRRSHPLAYDDRLIEGIKKERQSLASFRQQSQVVIDTSDLTPRQLREKFVKLFGQSAENKLFRVELVSFGFKYGIPTDADIVMDVRFLPNPHYLPELKDQTGLDESVYDYVMQQPETEQFFQKFIDLLTFNLPGYKKEGKTSLTVAIGCTGGRHRSVALTERVAKTLSGDGYDVNVSHRDKDKDKESVIRS

SEQ ID NO: 2771 - DNA, 912 bp, Alloiococcus otitidis; identical to SEQ ID NO: 2769
  CDS (1)..(909)

SEQ ID NO: 2772 - protein, 303 aa, Alloiococcus otitidis
MTRKETLMGEQIEVVIITGMSGAGKTVAVQCLEDLGYYCIDNMPPELLPTFWDLTRKSAQLTKVALVMDLRMRDFFSHMKDSLAKIENTPYIVKRMVFLDCSDEELINRYKESRRSHPLAYDDRLIEGIKKERQSLASFRQQSQVVIDTSDLTPRQLREKFVKLFGQSAENKLFRVELVSFGFKYGIPTDADIVMDVRFLPNPHYLPELKDQTGLDESVYDYVMQQPETEQFFQKFIDLLTFNLPGYKKEGKTSLTVAIGCTGGRHRSVALTERVAKTLSGDGYDVNVSHRDKDKDKESVIRS

SEQ ID NO: 2773 - DNA, 1020 bp, Alloiococcus otitidis
  CDS (25)..(1017)
agacaaggagtccgtaattcgatcatgaccatttccagaagacccaaaattgtgatgatcggtggtggcactggcctccccgttatcttaaaaaacctaaaaaagttaaaagcagacttgacagcgattgttacggttgccgatgatggtggcagcagtggtcgcttgcgggaagtgtttgaagccatcccgccaggggatatccgcaatattttagtcgctttgagtgatattccccaaattcaaaaggatattttccagtaccgctttcagtcagacgaccccatgtttggggggcatgctatcggtaacttgattatccaagctgtgtcagagatgaaaggcgatatcaatgaagctatccaggttttagctgacatgatgaaggtggagggtcatatttatccagcttctgacaagcccttggtcctccatgcccgctacaaggatggcagcttagcttctggtgagtccaagattccgatctctggtaagttaattgactatgtggctgtttcttctcttgacactgaccacggaccggtggaatgtggtagtcatgtcaaggaagccattatggcagctgatgccgtggttctagggcctggatccctttataccagcattttgcccaacctgatgattccagacctaggggaagcagttttgaaaacgtcggccaaggttatttatatttgcaatattatgacccaactaggtgaaacggaaggctttaccgatgcccagcacgttgaagtcctctaccaccaccttaaccaaaactttatcgacacagccttgatcaacaatgctcaggtaccatcagattatatcagcatggaagggtcagaaattttataccaggttcaacacgattttaatggtttaagccaagctgttccccatgtgatttcagatgatttcctggacttgtcagctggtggagtctaccacaatggggccaaggcagccaaggaaatcttcaatatcgccaccagtaataagaaccagaccgtttaa

SEQ ID NO: 2774 - protein, 331 aa, Alloiococcus otitidis
MTISRRPKIVMIGGGTGLPVILKNLKKLKADLTAIVTVADDGGSSGRLREVFEAIPPGDIRNILVALSDIPQIQKDIFQYRFQSDDPMFGGHAIGNLIIQAVSEMKGDINEAIQVLADMMKVEGHIYPASDKPLVLHARYKDGSLASGESKIPISGKLIDYVAVSSLDTDHGPVECGSHVKEAIMAADAVVLGPGSLYTSILPNLMIPDLGEAVLKTSAKVIYICNIMTQLGETEGFTDAQHVEVLYHHLNQNFIDTALINNAQVPSDYISMEGSEILYQVQHDFNGLSQAVPHVISDDFLDLSAGGVYHNGAKAAKEIFNIATSNKNQTV

SEQ ID NO: 2775 - DNA, 942 bp, Alloiococcus otitidis
  CDS (13)..(939)
aggagggttaacatgtcttttgcaggtgatgttaaaaaagaattaaccatgctggaagtccatcccgaacatgcaaaagctgaattagccgccttgattcggatgaacgggactttgggtctggttgaccgggaattctatttgaatgtccaaactgaaaatgcagctattgcccggcggatttttagcctgattaaagatacttttaatgtccaggctgaattatcagtccgtaaaaaaatgaagttgaagaaaaataacgtctacattgtccggctcagaagtggtagccagaccatcttgtccgaattgggcatcctaaagggcatgctctattcaggatctgttccagaagagtacaagactaatgaacaaaaaatgcggtcctatctcaggggagcttttttggctggcgggtcggttaatagcccagggaccagccgttatcacttggagattcactcggtttacgaagagcataacaatgatatttatgacatgtttgactatttttcactaaaccccaaaaagcacgagcgtaaaagtgggggctacattgtctacctgaaaaaatctgaaaagatagctgactttatggccgtcattggggccactaacagcatgttccaatttgaagatgttcggattgtccgggacatgcggaattcggtcaaccgcctggtcaattgcgaaactgccaacctaaacaagaccatttcagcggccagcaagcaaattgatagcatccagttgatcgaccaagaaatcggcttggatgacctgcccaaaaaactctttgaagtggccataacccggttgaaacaccccgatgtttccttaaaagaattgggtgaattggtgccgtcgggtccgatttctaaaagtggagtcaaccaccgcttgcgtaaaatcaaccagttggcggatgaactccggtcttaa

SEQ ID NO: 2776 - protein, 309 aa, Alloiococcus otitidis
MSFAGDVKKELTMLEVHPEHAKAELAALIRMNGTLGLVDREFYLNVQTENAAIARRIFSLIKDTFNVQAELSVRKKMKLKKNNVYIVRLRSGSQTILSELGILKGMLYSGSVPEEYKTNEQKMRSYLRGAFLAGGSVNSPGTSRYHLEIHSVYEEHNNDIYDMFDYFSLNPKKHERKSGGYIVYLKKSEKIADFMAVIGATNSMFQFEDVRIVRDMRNSVNRLVNCETANLNKTISAASKQIDSIQLIDQEIGLDDLPKKLFEVAITRLKHPDVSLKELGELVPSGPISKSGVNHRLRKINQLADELRS

SEQ ID NO: 2777 - DNA, 762 bp, Alloiococcus otitidis
  CDS (76)..(759)
aagccaagctttcattttatattccttattgaagtggtatccagtataatgaacgaagaaagaagggtacaagctatggtaaccaaccgcatccaagaactgctaaaaactaaggataatttggctaaggttcctctgctagagcttttcaatgggattttcctcagcaatgactcgagtgaccgtgagtttttagccagcctagttaacttccatttgtcgaccagacaaaaaaagatccttatggctgatgacccgactcccattaagcaggcaaacgtggacggagaccgaaaacgaagacgggaaatcaacttgattatcggagtcgatggggtggggaagtctatcttccgggccactgccctcgacttatttagtcacacttactttgtccaaaagaaccaccattcattatacaagttttgccagacatgctttgacctcaagttccctctcaccatcgaagcccggttgactactgacgacttcgacctggttccgatttgcaagttagccaaagaaaaagactacctggtctcaatctatgctattgaagtggaatcaggtgaaattattcatgaccgtctgagtagccgaaaaggccggtcacccttcacaggggcagaactccaagccaagcaattttattgccaagatttgttagatgacttattggaccaagcagaccgctttgcgatttttgataattcaacttattttaacttaatccagctcagtggcaattaccagctgaactag

SEQ ID NO: 2778 - protein, 228 aa, Alloiococcus otitidis
MVTNRIQELLKTKDNLAKVPLLELFNGIFLSNDSSDREFLASLVNFHLSTRQKKILMADDPTPIKQANVDGDRKRRREINLIIGVDGVGKSIFRATALDLFSHTYFVQKNHHSLYKFCQTCFDLKFPLTIEARLTTDDFDLVPICKLAKEKDYLVSIYAIEVESGEIIHDRLSSRKGRSPFTGAELQAKQFYCQDLLDDLLDQADRFAIFDNSTYFNLIQLSGNYQLN

SEQ ID NO: 2779 - DNA, 762 bp, Alloiococcus otitidis; identical to SEQ ID NO: 2777
  CDS (49)..(759)

SEQ ID NO: 2780 - protein, 237 aa, Alloiococcus otitidis
MNEERRVQAMVTNRIQELLKTKDNLAKVPLLELFNGIFLSNDSSDREFLASLVNFHLSTRQKKILMADDPTPIKQANVDGDRKRRREINLIIGVDGVGKSIFRATALDLFSHTYFVQKNHHSLYKFCQTCFDLKFPLTIEARLTTDDFDLVPICKLAKEKDYLVSIYAIEVESGEIIHDRLSSRKGRSPFTGAELQAKQFYCQDLLDDLLDQADRFAIFDNSTYFNLIQLSGNYQLN

SEQ ID NO: 2781 - DNA, 762 bp, Alloiococcus otitidis; identical to SEQ ID NO: 2777
  CDS (34)..(759)

SEQ ID NO: 2782 - protein, 242 aa, Alloiococcus otitidis
MVSSIMNEERRVQAMVTNRIQELLKTKDNLAKVPLLELFNGIFLSNDSSDREFLASLVNFHLSTRQKKILMADDPTPIKQANVDGDRKRRREINLIIGVDGVGKSIFRATALDLFSHTYFVQKNHHSLYKFCQTCFDLKFPLTIEARLTTDDFDLVPICKLAKEKDYLVSIYAIEVESGEIIHDRLSSRKGRSPFTGAELQAKQFYCQDLLDDLLDQADRFAIFDNSTYFNLIQLSGNYQLN

SEQ ID NO: 2783 - DNA, 369 bp, Alloiococcus otitidis
  CDS (67)..(366)
ctaaataagtcgagggcagtggcccggaagatagacttccccaccccatcgactccgataatcaagttgatttcccgtcttcgttttcggtctccgtccacgtttgcctgcttaatgggagtcgggtcatcagccataaggatctttttttgtctggtcgacaaatggaagttaactaggctggctaaaaactcacggtcactcgagtcattgctgaggaaaatcccattgaaaagctctagcagaggaaccttagccaaattatccttagtttttagcagttcttggatgcggttggttaccatagcttgtacccttctttcttcgttcattatactggataccacttcaataaggaatataaaatga

SEQ ID NO: 2784 - protein, 100 aa, Alloiococcus otitidis
MISRLRFRSPSTFACLMGVGSSAIRIFFCLVDKWKLTRLAKNSRSLESLLRKIPLKSSSRGTLAKLSLVFSSSWMRLVTIACTLLSSFIILDTTSIRNIK

SEQ ID NO: 2785 - DNA, 627 bp, Alloiococcus otitidis
  CDS (274)..(624)
attaaatattatcgatctctaggaggaatagtaatgaatttagttcccacagttattgaacagtcaccaaaaggcgaacgtgcctatgatatttactcaagattattaaaagaccgaattattattctaggcgatgccattgacaataatgtagctaactcagttgtttcccaacttttattcttagatgcccaagattcagataaagatatctacctttatgtcaactcccctggtggcagtgtcacagcaggtcttgccatctatgataccatgaactttattaaagctgatgtccaaactatcgtcattggtctagcagcttccatggggtctgtcttggcaacagcaggggctaagggcaaacgttttgccttgcctaactcagaaatcatgatccaccaacccctaggtggggctcaaggtcaggcaactgaaatcgaaatcgcagctaaaaatatccttcgaacccgtgaaagattgaacaaaattttagctgaagcaactggtcaagacttagaaaccattgaccgggataccgaccgagactactttatgactgctgaagaagccttagaatatggcttaattgatgatatcatggaaacaagtgacaaactatcctaa

SEQ ID NO: 2786 - protein, 117 aa, Alloiococcus otitidis
MNFIKADVQTIVIGLAASMGSVLATAGAKGKRFALPNSEIMIHQPLGGAQGQATEIEIAAKNILRTRERLNKILAEATGQDLETIDRDTDRDYFMTAEEALEYGLIDDIMETSDKLS

SEQ ID NO: 2787 - DNA, 627 bp, Alloiococcus otitidis; identical to SEQ ID NO: 2785
  CDS (34)..(624)

SEQ ID NO: 2788 - protein, 197 aa, Alloiococcus otitidis
MNLVPTVIEQSPKGERAYDIYSRLLKDRIIILGDAIDNNVANSVVSQLLFLDAQDSDKDIYLYVNSPGGSVTAGLAIYDTMNFIKADVQTIVIGLAASMGSVLATAGAKGKRFALPNSEIMIHQPLGGAQGQATEIEIAAKNILRTRERLNKILAEATGQDLETIDRDTDRDYFMTAEEALEYGLIDDIMETSDKLS

SEQ ID NO: 2789 - DNA, 1032 bp, Alloiococcus otitidis
  CDS (19)..(1029)
agtgaggagcgaattgaaatgttgtcattgatcgaagagcttgtaccgggaacatttcaagtcattgttcagcggtatcagatacttaaggaagttgaaagtcaaagcccaatcggtcgccgggccctagccaaacaggtagacctgtctgagcgaagcttgcggacagaaattcaagttctcaaagaccaggcttttatttcaacttcatctgctggtatgtctttgaccactttaggaatccggatcttggatgacctagaagacctagtcaaggaccaggccagtttccgtgaatcagaagacgccctcgctaagcaattagagataagccagtgcatcatttgtcgcagggacagtcaagagagcctggcgcaggaggcattggcagtcatggaccgcctcctgcctcatgggagccagaccattgcagttatgggagggacgaccatgcggaagttggcagagtcctttgatgaatccctgtcaaccaaccgaaccctccaattcctacccgctcgaggcggggcaggagaagagcaaaccatccaggccaatgctatcgcggatttgatggctaaccggacccatggaaccagtcgacttctctatgccccagaccatgtcagaagcgaaacccggaatttacttttacaggagcctgagattaaggaaaccatgaggcggttgagccaggctgacttagcagtttttgggattggggatgccaaaaaaatggctaaccgaatcggattagaccaagccaccattaaccagttagataaggctggtgccgtggctgaagcctttggtgaatttattgatgctaagggtgagattgtttataagttagctcggattggcttatcttcagaagatattcaagccattcccaacctcctagcggtagcgggtggggctggcaaggcgcaagctattgacgcctactgcaaggtggcacccagccatactattttagtgaccgaccaagcagcagcaaataagattttaaattgggagtcatcccattaa

SEQ ID NO: 2790 - protein, 337 aa, Alloiococcus otitidis
MLSLIEELVPGTFQVIVQRYQILKEVESQSPIGRRALAKQVDLSERSLRTEIQVLKDQAFISTSSAGMSLTTLGIRILDDLEDLVKDQASFRESEDALAKQLEISQCIICRRDSQESLAQEALAVMDRLLPHGSQTIAVMGGTTMRKLAESFDESLSTNRTLQFLPARGGAGEEQTIQANAIADLMANRTHGTSRLLYAPDHVRSETRNLLLQEPEIKETMRRLSQADLAVFGIGDAKKMANRIGLDQATINQLDKAGAVAEAFGEFIDAKGEIVYKLARIGLSSEDIQAIPNLLAVAGGAGKAQAIDAYCKVAPSHTILVTDQAAANKILNWESSH

SEQ ID NO: 2791 - DNA, 1032 bp, Alloiococcus otitidis
  CDS (37)..(1029)
aataaaaatttagattttctaaggaggaaatcatttatgtcagtaaaagtagcaattaacggttttggacgtatcggtcgtttatcccttcgtcgtattttagaagtagattcagacctagaagttgttgccatcaacgatttgacagacaacgatgatctagcttacctcttgaaatacgatacagctcaaggacgcttcccttactctgtagaagttaaagaaggtgcccttgttgtcgatgggaaagaaattaaagcctacgacgaaaaagaccctgaaaaattaccttggggcgacctcggtgtggacgttgtgctagaagctactggtgttttcaacaaccaagaaaaagctggcaaacaccttcaagcaggagctaaaaaagtcgttattacagcacctgccaaagacactgacactaaaactgttgtttatggggttaaccaagatattctggatgcggacgacaaagttatttcagctgcatcttgtaccactaactgcctagctccagtcgttaaagtcctaaatgatgaatacggcttgaacagtggtttgatgtccactatccacgcttacactgctacccagtctcttcaagatgcacctggtggacgtaaaagccgggctggtgcttccaacgcgattccagcatcaactggagctgctaaagcagtgggtaaagttatccctgaagttgacggtaaaattgacggcactgctgtccgtatcccaaccattacaggatcaatgactgaagtttacgttaccttagacaaagaagtaaccgctgatgaagtgaatgcggcaatgaaagctgcaagcagcgatgcatttgaatacaatgaagatgaaattgtttcatctgatattatcggtgacccagctggctcaattttcgatgccactcaaactaaggtaatcgatggcgcaaacggccaattggttaaagtagttgcttggtacgacaatgaatacggctttaccggtaaccttatccgtacactagaacacctggtatctttataa

SEQ ID NO: 2792 - protein, 331 aa, Alloiococcus otitidis
MSVKVAINGFGRIGRLSLRRILEVDSDLEVVAINDLTDNDDLAYLLKYDTAQGRFPYSVEVKEGALVVDGKEIKAYDEKDPEKLPWGDLGVDVVLEATGVFNNQEKAGKHLQAGAKKVVITAPAKDTDTKTVVYGVNQDILDADDKVISAASCTTNCLAPVVKVLNDEYGLNSGLMSTIHAYTATQSLQDAPGGRKSRAGASNAIPASTGAAKAVGKVIPEVDGKIDGTAVRIPTITGSMTEVYVTLDKEVTADEVNAAMKAASSDAFEYNEDEIVSSDIIGDPAGSIFDATQTKVIDGANGQLVKVVAWYDNEYGFTGNLIRTLEHLVSL

SEQ ID NO: 2793 - DNA, 1191 bp, Alloiococcus otitidis
  CDS (7)..(1188)
tctactatggctaagcaaattgttaaagatttagatgtaaaagacaaaaaagtcctcgtccgggtcgatttcaacgttcccatgaaagatggcgagatcaccaacgacaaccggattcaggcatcattagagaccattaattacttgatcgaccagggtgctaaattggttcttttctcccacctgggccgggtcaaaagtgaagaagataaggccaaaaactcccttcgaccagttgctgaccgtctaagcgatttgctaggtaagccagtgacctttatcccagaaacccggggtccaaaattagaagaggcggttgacaagcttgaagccggccaagttctattagtggaaaacacccggttcgaagacttggatggtaagaaggaaagtaaaaatgatccagaacttggtaaatattgggctagcttaggtgacctctatgtcaatgatgctttcggaactgcccaccggtctcatgcttccaatgtggggattgcttctcacttggattctgcagttggcttcctcatcgaaaaagaaattgattttatcggtggtgctgttgacaatccagaaagaccttttgtagccatactgggtggtgccaaggtatctgacaagatcggggttatcgaaaacctcataggcaaggctgacaaggtcttaatcggcggtggcatggcctacactttcttcaaagcccaagggaaagacatcggcgactccctcttagaagaggacaaggtcgacttggctaaagacctactagaccgagcaggggacaagttggtcttacctgttgacacagttgccggcaaggactttgacaatgagacagaaagccaggtctttgaaggcaaaattgaaccgggctaccaaggcttagacattggtccgaaaactgttgaccttttcactgatgaactccaggatgccaagacggtggtttggaacggaccgctcggcgtctttgaaatggccaactttgctaaagggactgaacaaatttgtgaagtcctagccaaaatcccagcaaccactattatcggtggtggcgactcagcgacagctgccagcgacttaggctttgccgatgactttgaccacatttcaactggtggtggagctagcttgcaataccttgaaggcaaagaattaccaggcattgcagcaatttcggacaagtaa

SEQ ID NO: 2794 - protein, 394 aa, Alloiococcus otitidis
MAKQIVKDLDVKDKKVLVRVDFNVPMKDGEITNDNRIQASLETINYLIDQGAKLVLFSHLGRVKSEEDKAKNSLRPVADRLSDLLGKPVTFIPETRGPKLEEAVDKLEAGQVLLVENTRFEDLDGKKESKNDPELGKYWASLGDLYVNDAFGTAHRSHASNVGIASHLDSAVGFLIEKEIDFIGGAVDNPERPFVAILGGAKVSDKIGVIENLIGKADKVLIGGGMAYTFFKAQGKDIGDSLLEEDKVDLAKDLLDRAGDKLVLPVDTVAGKDFDNETESQVFEGKIEPGYQGLDIGPKTVDLFTDELQDAKTVVWNGPLGVFEMANFAKGTEQICEVLAKIPATTIIGGGDSATAASDLGFADDFDHISTGGGASLQYLEGKELPGIAAISDK

SEQ ID NO: 2795 - DNA, 762 bp, Alloiococcus otitidis
  CDS (7)..(759)
tcattgatgcgtaaacctattattgcaggaaattggaagatgaacaaaacggcgccagaagtccaatcttttgttgaaaccatcaagggcaagttgcccaagccagaccaggttgaagctgtgattggggcacctaacatttttacccagtcattagtagatttaacagctgatttggatgtgaaagtggcagctcaaaatgcctactatgaagattctgggtctttcacaggggaaacttcccccttggccctcgctgacctggggactgactatgtgattatcggtcactctgaacgccgggatatttttggcgaaagcgaccaggacgtgaacaaaaaggccaaggctattttcaggaataatatgctccctattatttgcttaggggagtcactggagaccaaagaagcaggccagacaagtgactttgtggccggtcaagtcaaggctgccttggaaggacttgacggagaccaggttcaaaatctcgttctggcatacgagccaatttgggcgattggaactgggaaaacagccagcccacaagaagctaatgaaaccattaaagtagtccgccaaactgtagctgacctctatagccaagaagtcgctgaccaagtccggatccaatacggtggatctgtcaagccagacaatattgctgacttcctagcgacttctgatattgatggggccttagtgggcggtgctagtttagaagctgaatcattcttgcaattattaggagcggttcaataa

SEQ ID NO: 2796 - protein, 251 aa, Alloiococcus otitidis
MRKPIIAGNWKMNKTAPEVQSFVETIKGKLPKPDQVEAVIGAPNIFTQSLVDLTADLDVKVAAQNAYYEDSGSFTGETSPLALADLGTDYVIIGHSERRDIFGESDQDVNKKAKAIFRNNMLPIICLGESLETKEAGQTSDFVAGQVKAALEGLDGDQVQNLVLAYEPIWAIGTGKTASPQEANETIKVVRQTVADLYSQEVADQVRIQYGGSVKPDNIADFLATSDIDGALVGGASLEAESFLQLLGAVQ

SEQ ID NO: 2797 - DNA, 762 bp, Alloiococcus otitidis; identical to SEQ ID NO: 2795
  CDS (4)..(759)

SEQ ID NO: 2798 - protein, 252 aa, Alloiococcus otitidis
MMRKPIIAGNWKMNKTAPEVQSFVETIKGKLPKPDQVEAVIGAPNIFTQSLVDLTADLDVKVAAQNAYYEDSGSFTGETSPLALADLGTDYVIIGHSERRDIFGESDQDVNKKAKAIFRNNMLPIICLGESLETKEAGQTSDFVAGQVKAALEGLDGDQVQNLVLAYEPIWAIGTGKTASPQEANETIKVVRQTVADLYSQEVADQVRIQYGGSVKPDNIADFLATSDIDGALVGGASLEAESFLQLLGAVQ

SEQ ID NO: 2799 - DNA, 1569 bp, Alloiococcus otitidis
  CDS (34)..(1566)
atcattcttgcaattattaggagcggttcaataatgacaaaaaaaccagttgcaattatcatcttagatggccttggttggcgggaagaaaccgaccataatgcagtagcccaagctaaaaaaaccaactttgaccgctactgggaccaattccctcatgctactatgcaggcatctggccaagctgttggcctaccagaagggcaaatgggtaactcagaagtaggtcataccaatattggggctggccgggttgtctaccaaagtattacccgaattgataagtcaatagaagaaggggaattgtccagtaacccagccttccaagatgcaatcgaccatgccaaaagcaagcactcagcccttcactttatgggcttggtatctgatggtggcgttcactcccaccaacgccacctcctcgccctcttggaagaggctaaaaaacagggagtggacaaggtctatgttcacgcctttacagacggtcgtgacgtggcaccggattctgcttctggatttattgctgacttaaaccaagccttaaaagatcaggacttgggccgtcttgcaagcatcagtggccgtttttatgctatggaccgagataaccgctggccaagaatcaaaaaagcctatgatgctatccgctatggccaaggtcaccaagcccaagaccctgttcaagccattcaaaactcttatgctgatgatgttatggatgaatttattgaaccaattgtgttaacagacgaccaaggtcaagcaattggtccattatccgaccaagacagcgtagtcttctttaacttccggcctgaccgggcaattcaactgtcccgggccttgtctgagcctggctttgacgaatttgacctgggtcaagccttagaagatgtcaagctgaccaccatgactcagtatacggaagacatgaatgcccaagtgatgtaccctcctgtcaagcttaaaaatgtgattggagaagttttagctgaccacggattaagccaacttcggattgctgaaacagaaaaatacccccacgtcaccttctttatgaacggtggggacaacaaggaatatcctggcgaaagtcggacccttatcccatccccaaaagtggaaacctatgacttgaaaccagagatgagcgcttatgaagtggctgattccctagtagctgacttggacgaggacaaatacgatgccgtcattcttaacttcgccaacccagacatggtgggccactctggtaagttagatcctaccatcaaggctgttgaagcagtagacgaaaacttgggccgtgtagtagacaagattctagaaaaagatggggcagccatcatctttgctgaccatggcaatgctgacacccttcaaactccagaaggcaacccccatactgcccacaccactgttccggtcccattgattgtaaccaagtcaggtgtcaaattgcgacaggatggcaagttggccgatgtggcacctaccatgcttgaattgcttggcattgatcaaccagaagaaatgaccggccgatctttaattgatcataactaa

SEQ ID NO: 2800 - protein, 511 aa, Alloiococcus otitidis
MTKKPVAIIILDGLGWREETDHNAVAQAKKTNFDRYWDQFPHATMQASGQAVGLPEGQMGNSEVGHTNIGAGRVVYQSITRIDKSIEEGELSSNPAFQDAIDHAKSKHSALHFMGLVSDGGVHSHQRHLLALLEEAKKQGVDKVYVHAFTDGRDVAPDSASGFIADLNQALKDQDLGRLASISGRFYAMDRDNRWPRIKKAYDAIRYGQGHQAQDPVQAIQNSYADDVMDEFIEPIVLTDDQGQAIGPLSDQDSVVFFNFRPDRAIQLSRALSEPGFDEFDLGQALEDVKLTTMTQYTEDMNAQVMYPPVKLKNVIGEVLADHGLSQLRIAETEKYPHVTFFMNGGDNKEYPGESRTLIPSPKVETYDLKPEMSAYEVADSLVADLDEDKYDAVILNFANPDMVGHSGKLDPTIKAVEAVDENLGRVVDKILEKDGAAIIFADHGNADTLQTPEGNPHTAHTTVPVPLIVTKSGVKLRQDGKLADVAPTMLELLGIDQPEEMTGRSLIDHN

SEQ ID NO: 2801 - DNA, 282 bp, Alloiococcus otitidis
  CDS (16)..(279)
aattcagaagcagcgatgtcaaagcctaagaagacgtcttggccaggttctaaaccagcttttttgatggcttctaagatggtttcaaccccatcttcagttccttcaaatttaggggcaaagccaccttcatctccgactgaggtttccaatccccggtctttcaagatggacttaagggcatggaaaatttcagcaccccagcgaagtgcttctttgaaagtaggcgctccagttggtaaaatcataaattcctggaaggcaattggggcactggagtga

SEQ ID NO: 2802 - protein, 88 aa, Alloiococcus otitidis
MSKPKKTSWPGSKPAFLMASKMVSTPSSVPSNLGAKPPSSPTEVSNPRSFKMDLRAWKISAPQRSASLKVGAPVGKIINSWKAIGALE

SEQ ID NO: 2803 - DNA, 1353 bp, Alloiococcus otitidis
  CDS (55)..(1350)
ctaaagtcaatttttttagaaaaaatagtaaaactctataaaggagagaaaaccatgccaaatattattgatcttcatgctagagaagtcttggactcacgagggaatccaactgtagaagtcgaagtcgttactgaatcaggggcctttggtcgaggaattgtgccttcaggtgcttcaactggtgaacacgaagcggttgaattacgagatggggaccaagaccgttactcgggtaaaggagtccaaaaagcagttgacaatgtgaacaatgtcatcgctgacgaaattattggttttgacgtcagagaccaattggccatcgaccaaaccttaatcgacttggacggaactgataacaagggcaaattaggggccaatgccatcttgggtgtttccattgcggtggcccgggctgctgctgaatttgtcggccttcccctctaccgctacctcggtggctttaacggtaaagttttgccaaccccaatgatgaacatcatcaacggtgggtctcactccagtgccccaattgccttccaggaatttatgattttaccaactggagcgcctactttcaaagaagcacttcgctggggtgctgaaattttccatgcccttaagtccatcttgaaagaccggggattggaaacctcagtcggagatgaaggtggctttgcccctaaatttgaaggaactgaagatggggttgaaaccatcttagaagccatcaaaaaagctggtttagaacctggccaagacgtcttcttaggctttgacatcgctgcttctgaattctaccatgatggagtgtatgactacactaaatttgaaggggacaagggagctaaacggtcagctgatgagcaagttgactacttggaagaattggtcaacaaataccctatcatctccattgaagacggaatggatgaaaacgactgggaaggttgggaaaaactcaccgaccgcttaggtgacaaggtccaactggttggcgatgacttattcgtcaccaacactgaaatcctggccaaaggaatcgaaaaaggtgttggtaactccatcttaatcaaggtcaaccaaattggtagcttaactgaaaccttcaacgccattgaaatggctaaacaagcaggctacacagccgttgtctcccaccgatctggtgaaacagaagatgcaactatttctgatattgccgtagcaaccaatgctggccaaatcaaaactgggtcactttcacggaccgaccgtattgccaaatacaaccaattgctccgcattgaagaaagcttaggccaacaagctgtctaccgcggcaaagatgctttttataacttaaacaaataa

SEQ ID NO: 2804 - protein, 432 aa, Alloiococcus otitidis
MPNIIDLHAREVLDSRGNPTVEVEVVTESGAFGRGIVPSGASTGEHEAVELRDGDQDRYSGKGVQKAVDNVNNVIADEIIGFDVRDQLAIDQTLIDLDGTDNKGKLGANAILGVSIAVARAAAEFVGLPLYRYLGGFNGKVLPTPMMNIINGGSHSSAPIAFQEFMILPTGAPTFKEALRWGAEIFHALKSILKDRGLETSVGDEGGFAPKFEGTEDGVETILEAIKKAGLEPGQDVFLGFDIAASEFYHDGVYDYTKFEGDKGAKRSADEQVDYLEELVNKYPIISIEDGMDENDWEGWEKLTDRLGDKVQLVGDDLFVTNTEILAKGIEKGVGNSILIKVNQIGSLTETFNAIEMAKQAGYTAVVSHRSGETEDATISDIAVATNAGQIKTGSLSRTDRIAKYNQLLRIEESLGQQAVYRGKDAFYNLNK

SEQ ID NO: 2805 - DNA, 246 bp, Alloiococcus otitidis
  CDS (19)..(243)
aagctcactggaatcttcttggtaaaaattgtttccttggctttgggggctggcccagaccttttgattaaacaaagtcaggttgagtcccaagcagagaccaagtaccataaattttatccgggttgttttgctttttgtcatgaatccgccacctatcctgtgatcttaattaaaatctaccacaagccttggtcgcaatcaattcatttatcgtcttgtaacaagacctacacctttttgtaa

SEQ ID NO: 2806 - protein, 75 aa, Alloiococcus otitidis
MVKIVSLALGAGPDLLIKQSQVESQAETKYHKFYPGCFAFCHESATYPVILIKIYHKPWSQSIHLSSCNKTYTFL

SEQ ID NO: 2807 - DNA, 306 bp, Alloiococcus otitidis
  CDS (34)..(303)
ccctcccactcattttcctcggcttggattggattgggctttgcttcttccggctcatccttagcttggtttgtcttaaaggacacagcttgcttttggacctcttttgcctctaatccaacttcaattttagtcttttctggactcgcttccgcattgccttctttctcttccctcagaaagatttcggaaccaggactaagatggtctggtcttggctcataccagtcctggtcagggtctgaaggtcttgctcttacagggtcaaatgattcatctgaaagctcactggaatcttcttggtaa

SEQ ID NO: 2808 - protein, 90 aa, Alloiococcus otitidis
MGFASSGSSLAWFVLKDTACFWTSFASNPTSILVFSGLASALPSFSSLRKISEPGLRWSGLGSYQSWSGSEGLALTGSNDSSESSLESSW

SEQ ID NO: 2809 - DNA, 342 bp, Alloiococcus otitidis
  CDS (34)..(339)
ggctggggcccaggttctggacccggctcaggtttgggttccggtttggggcttggacttggcttaggttccggtttggggcctggttcgggctctggcttcggttctggacccggttctggttcgggattggggtccccaggctctggtttagcttctgaacccggttcaggtttggagcccggatttggttcagaccctggcgcgggctcaggcttcaaatcgggttcaggccctggcgcaggctttggtttgggttcgggcttgggttcgctatcctgccctggtcctgttttggcctcacgaccttgcccgggtttcggcttgggctcttccccttga

SEQ ID NO: 2810 - protein, 102 aa, Alloiococcus otitidis
MGSGLGLGLGLGSGLGPGSGSGFGSGPGSGSGLGSPGSGLASEPGSGLEPGFGSDPGAGSGFKSGSGPGAGFGLGSGLGSLSCPGPVLASRPCPGFGLGSSP

SEQ ID NO: 2811 - DNA, 1092 bp, Alloiococcus otitidis
  CDS (364)..(1089)
gatcacaggataggtggcggattcatgacaaaaagcaaaacaacccggataaaatttatggtacttggtctctgcttgggactcaacctgactttgtttaatcaaaaggtctgggccagcccccaaagccaaggaaacaatttttaccaagaagattccagtgagctttcagatgaatcatttgaccctgtaagagcaagaccttcagaccctgaccaggactggtatgagccaagaccagaccatcttagtcctggttccgaaatctttctgagggaagagaaagaaggcaatgcggaagcgagtccagaaaagactaaaattgaagttggattagaggcaaaagaggtccaaaagcaagctgtgtcctttaagacaaaccaagctaaggatgagccggaagaagcaaagcccaatccaatccaagccgaggaaaatgagtgggagggtcaaggggaagagcccaagccgaaacccgggcaaggtcgtgaggccaaaacaggaccagggcaggatagcgaacccaagcccgaacccaaaccaaagcctgcgccagggcctgaacccgatttgaagcctgagcccgcgccagggtctgaaccaaatccgggctccaaacctgaaccgggttcagaagctaaaccagagcctggggaccccaatcccgaaccagaaccgggtccagaaccgaagccagagcccgaaccaggccccaaaccggaacctaagccaagtccaagccccaaaccggaacccaaacctgagccgggtccagaacctgggccccagcctcaaccagaaccgattcctgaaccccaacctaagcatccaaggcctgctcctcaacctgaccgacctggcaaagatttaattagcgattaccagcctcaaggggaagagttggaccagctcattgatgtcctgctcagtgaaggccccagagaggctgagcggttgagagaccaatacgccaagaagaaggcgggaggtcagaaactgccggacacagcaacaacaagctggcttctaccaggcttaggcttattagccataggtctaggcattacgctaagatttaattataatagatga

SEQ ID NO: 2812 - protein, 242 aa, Alloiococcus otitidis
MSFKTNQAKDEPEEAKPNPIQAEENEWEGQGEEPKPKPGQGREAKTGPGQDSEPKPEPKPKPAPGPEPDLKPEPAPGSEPNPGSKPEPGSEAKPEPGDPNPEPEPGPEPKPEPEPGPKPEPKPSPSPKPEPKPEPGPEPGPQPQPEPIPEPQPKHPRPAPQPDRPGKDLISDYQPQGEELDQLIDVLLSEGPREAERLRDQYAKKKAGGQKLPDTATTSWLLPGLGLLAIGLGITLRFNYNR

SEQ ID NO: 2813 - DNA, 1092 bp, Alloiococcus otitidis; identical to SEQ ID NO: 2811
  CDS (25)..(1089)

SEQ ID NO: 2814 - protein, 355 aa, Alloiococcus otitidis
MTKSKTTRIKFMVLGLCLGLNLTLFNQKVWASPQSQGNNFYQEDSSELSDESFDPVRARPSDPDQDWYEPRPDHLSPGSEIFLREEKEGNAEASPEKTKIEVGLEAKEVQKQAVSFKTNQAKDEPEEAKPNPIQAEENEWEGQGEEPKPKPGQGREAKTGPGQDSEPKPEPKPKPAPGPEPDLKPEPAPGSEPNPGSKPEPGSEAKPEPGDPNPEPEPGPEPKPEPEPGPKPEPKPSPSPKPEPKPEPGPEPGPQPQPEPIPEPQPKHPRPAPQPDRPGKDLISDYQPQGEELDQLIDVLLSEGPREAERLRDQYAKKKAGGQKLPDTATTSWLLPGLGLLAIGLGITLRFNYNR

SEQ ID NO: 2815 - DNA, 591 bp, Alloiococcus otitidis
  CDS (10)..(588)
ggtgatcaaatgaagttgaaacagttgtcttttaccttggccagtttacttgtcctaactggatgccagggaggtaaccaagaaggggaccaagaccaaaatacccaggaagatactcaagtggaacaagacacggaccaggaagaagagaatagttcagaccaagaagcgaaccaaaattcaagcgatgaagaggaagcagacctagaaaccgaatcgcaagcgaaccaggttagtgacgataatgaccaagagtctgaccaaagccaagaggaaagcggtcaagaagaccaaagtcaggagaatcaagccgaccaagatcaaggagaccaggctaacaaggaagacatatctgaccgaactttcttatccaacttaaatgaaatttaccctattgtccgcgctgctaccaaccagtccaactacaatattagtgatgttctctttgaccaggatgaagaaggcgaccattacactatcgtggcttgggacggggctttccattatgaataccgaatcgacgccgaccagaatgaactagttgacagtcaagagaaaacaatgtggaacccctcgacatcattgaaatag

SEQ ID NO: 2816 - protein, 193 aa, Alloiococcus otitidis
MKLKQLSFTLASLLVLTGCQGGNQEGDQDQNTQEDTQVEQDTDQEEENSSDQEANQNSSDEEEADLETESQANQVSDDNDQESDQSQEESGQEDQSQENQADQDQGDQANKEDISDRTFLSNLNEIYPIVRAATNQSNYNISDVLFDQDEEGDHYTIVAWDGAFHYEYRIDADQNELVDSQEKTMWNPSTSLK

SEQ ID NO: 2817 - DNA, 231 bp, Alloiococcus otitidis
  CDS (73)..(228)
cagtcaagagaaaacaatgtggaacccctcgacatcattgaaatagacagcgtcctccagcctaatgaagccatggaccgggttcaagaagtaacaggtggagaggaaatttatagctggcaccttttctaccaacctgcctatgaccagcccgtttactccttcgaaaccgatgacgactatgtctttatcagtgccttagatggccaagaaattgaccaagaagagtaa

SEQ ID NO: 2818 - protein, 52 aa, Alloiococcus otitidis
MDRVQEVTGGEEIYSWHLFYQPAYDQPVYSFETDDDYVFISALDGQEIDQEE

SEQ ID NO: 2819 - DNA, 252 bp, Alloiococcus otitidis
  CDS (46)..(249)
cgagaaaaggaggccttgtttgtgtacgaattcctactaacctttatgttggttttatctatttttaccatactagtgattgctttacagcctacccggacgcaaagttcgtctaacgcctttatgggtggtgcaggtgaattattcgaaaaacaaaaagcgagaggactggaagcatttttaattaagacaacagttgtttgtttgattttattcttcggcgtttcctatgtcctatcccggtttttctaa

SEQ ID NO: 2820 - protein, 68 aa, Alloiococcus otitidis
MLVLSIFTILVIALQPTRTQSSSNAFMGGAGELFEKQKARGLEAFLIKTTVVCLILFFGVSYVLSRFF

SEQ ID NO: 2821 - DNA, 252 bp, Alloiococcus otitidis; identical to SEQ ID NO: 2819
  CDS (22)..(249)

SEQ ID NO: 2822 - protein, 76 aa, Alloiococcus otitidis
MYEFLLTFMLVLSIFTILVIALQPTRTQSSSNAFMGGAGELFEKQKARGLEAFLIKTTVVCLILFFGVSYVLSRFF

SEQ ID NO: 2823 - DNA, 252 bp, Alloiococcus otitidis; identical to SEQ ID NO: 2819
  CDS (16)..(249)

SEQ ID NO: 2824 - protein, 78 aa, Alloiococcus otitidis
MFVYEFLLTFMLVLSIFTILVIALQPTRTQSSSNAFMGGAGELFEKQKARGLEAFLIKTTVVCLILFFGVSYVLSRFF

SEQ ID NO: 2825 - DNA, 789 bp, Alloiococcus otitidis
  CDS (52)..(786)
accactctttttcttatacaggtaaaaggagtatcaacgaactttatgagtatggatgaaatttatcttgaacaggacggcgaccatgcaatactactcttgcatgcctacactagctattcaagggactttcgggtattttccaatgctttagaagaagctggctataccgtttatgcccctcacttttcaggccacgggattgaagacccagatggggtcatccaacatgggattgatgaatgggtcaagaacggccaagatgctttagaccgacttaaggctgaaggttatgaaaaaatttccgtcttcggtctttccctaggcggggtggttgcaagctatctagccttagaaaacccagatttagtcagtgctgggacattttcggcaccggtagcaggcaattatggtctgtccattgaagatgaatttaaagaatggtactacaataaaaaagaggccatgggttatagtcaagaagaagtagacgacttttaccaggattatgtccaagagggcttggcaaaagtaactgaggggattgaggcttttcgccaagaaaaaatggttgaccgctatcatgagattaccatgcccatttttattggccaagggggagaagataaaaatattgcccctgaacacggccaggcctttaaagatgccttggtcaatgccccggtcacttttaaactatacccgcatgctggccatgtccttaccattggccgggtcggtaaggaattgcgtgaagaccttcttgcatttttacaggaagcaaactaa

SEQ ID NO: 2826 - protein, 245 aa, Alloiococcus otitidis
MDEIYLEQDGDHAILLLHAYTSYSRDFRVFSNALEEAGYTVYAPHFSGHGIEDPDGVIQHGIDEWVKNGQDALDRLKAEGYEKISVFGLSLGGVVASYLALENPDLVSAGTFSAPVAGNYGLSIEDEFKEWYYNKKEAMGYSQEEVDDFYQDYVQEGLAKVTEGIEAFRQEKMVDRYHEITMPIFIGQGGEDKNIAPEHGQAFKDALVNAPVTFKLYPHAGHVLTIGRVGKELREDLLAFLQEAN

SEQ ID NO: 2827 - DNA, 789 bp, Alloiococcus otitidis; identical to SEQ ID NO: 2825
  CDS (46)..(786)

SEQ ID NO: 2828 - protein, 247 aa, Alloiococcus otitidis
MSMDEIYLEQDGDHAILLLHAYTSYSRDFRVFSNALEEAGYTVYAPHFSGHGIEDPDGVIQHGIDEWVKNGQDALDRLKAEGYEKISVFGLSLGGVVASYLALENPDLVSAGTFSAPVAGNYGLSIEDEFKEWYYNKKEAMGYSQEEVDDFYQDYVQEGLAKVTEGIEAFRQEKMVDRYHEITMPIFIGQGGEDKNIAPEHGQAFKDALVNAPVTFKLYPHAGHVLTIGRVGKELREDLLAFLQEAN

SEQ ID NO: 2829 - DNA, 468 bp, Alloiococcus otitidis
  CDS (181)..(465)
aattcaccaatcacactttcggttttccgctccaaaatcttggtgattttcccttcagctgccttgtccttgcgcgggtccggggccttgataatttcgacttggacctggtcgccatcaaaggcagtattggtggcattagctgggataaaaatatcttcttggtctgaatcttctaaaatgacaaagccaaagcccttgtcatttgccttaaatcttccttgtatctcttcgtcaattttttgttggttgataataaatgttcctttactggttaatataatttcttgtcttcgctcgagcttggcaatggccttgacaagttgcttgaattcttcagcagactccatatccagagctcttgctatatcgtttacctcaaggtcgtcccgagccccaatcgagtctactatcttcttctctaattcacttgtaaggtcagccattcatactcatcctttgacatag

SEQ ID NO: 2830 - protein, 95 aa, Alloiococcus otitidis
MTKPKPLSFALNLPCISSSIFCWLIINVPLLVNIISCLRSSLAMALTSCLNSSADSISRALAISFTSRSSRAPIESTIFFSNSLVRSAIHTHPLT

SEQ ID NO: 2831 - DNA, 285 bp, Alloiococcus otitidis
  CDS (10)..(282)
ctgaggggattgaggcttttcgccaagaaaaaatggttgaccgctatcatgagattaccatgcccatttttattggccaagggggagaagataaaaatattgcccctgaacacggccaggcctttaaagatgccttggtcaatgccccggtcacttttaaactatacccgcatgctggccatgtccttaccattggccgggtcggtaaggaattgcgtgaagaccttcttgcatttttacaggaagcaaactaaactatgtcaaaggatgagtatgaatggctga

SEQ ID NO: 2832 - protein, 91 aa, Alloiococcus otitidis
MRLFAKKKWLTAIMRLPCPFLLAKGEKIKILPLNTARPLKMPWSMPRSLLNYTRMLAMSLPLAGSVRNCVKTFLHFYRKQTKLCQRMSMNG

SEQ ID NO: 2833 - DNA, 342 bp, Alloiococcus otitidis
  CDS (85)..(339)
ccattcaaatccagaccaagggcttacgtcccgtccagggtgaaattgtcaaagtcgacattacccgctacccccactatacccatgaagatacggtgggacttgtcactgagaccattggccacaaggatgagcctggggtcgacatcttgtcaattgtccacaagcatggcatcccatctgaatttccagaagaagttctggaccaagctcaggaggtgccggaccaaattagtccagaagacctcaaaggccgaaaagacttgcggcaagagaccatcatcaccattgatggggccgatgccaaggacttggatgatgccatccaggtcaaacggctaa

SEQ ID NO: 2834 - protein, 85 aa, Alloiococcus otitidis
MKIRWDLSLRPLATRMSLGSTSCQLSTSMASHLNFQKKFWTKLRRCRTKLVQKTSKAEKTCGKRPSSPLMGPMPRTWMMPSRSNG

SEQ ID NO: 2835 - DNA, 417 bp, Alloiococcus otitidis
  CDS (187)..(414)
tcagtccgccatcaccttttggcatctagaaccctccttcctttgttattttttctcccgaattttaaagggatgcttgtgttttttatctttcttgtttttatgctttttcttcttgtttttctttttgcctttgccagcagtatgaccttgttgatttttcttgtcattccccttgccggagccatggtcagggtggttgtttttgcccttacccttcgcatgcttgccttttttacctttgtgcttgtgggcttttttcttatgcttggctttcttgtcttgaccacggttttggccctcattacctctgaccaagtcaaagtcaatctgaatactttggatgtctgcccggatcaacttaacggtaatttcttggccgatccggtagatattgccagtccgctgtccaactaa

SEQ ID NO: 2836 - protein, 76 aa, Alloiococcus otitidis
MVRVVVFALTLRMLAFFTFVLVGFFLMLGFLVLTTVLALITSDQVKVNLNTLDVCPDQLNGNFLADPVDIASPLSN

SEQ ID NO: 2837 - DNA, 417 bp, Alloiococcus otitidis; identical to SEQ ID NO: 2835
  CDS (103)..(414)

SEQ ID NO: 2838 - protein, 104 aa, Alloiococcus otitidis
MLFLLVFLFAFASSMTLLIFLVIPLAGAMVRVVVFALTLRMLAFFTFVLVGFFLMLGFLVLTTVLALITSDQVKVNLNTLDVCPDQLNGNFLADPVDIASPLSN

SEQ ID NO: 2839 - DNA, 417 bp, Alloiococcus otitidis; identical to SEQ ID NO: 2835
  CDS (73)..(414)

SEQ ID NO: 2840 - protein, 114 aa, Alloiococcus otitidis
MLVFFIFLVFMLFLLVFLFAFASSMTLLIFLVIPLAGAMVRVVVFALTLRMLAFFTFVLVGFFLMLGFLVLTTVLALITSDQVKVNLNTLDVCPDQLNGNFLADPVDIASPLSN

SEQ ID NO: 2841 - DNA, 417 bp, Alloiococcus otitidis; identical to SEQ ID NO: 2835
  CDS (19)..(414)

SEQ ID NO: 2842 - protein, 132 aa, Alloiococcus otitidis
MASRTLLPLLFFLPNFKGMLVFFIFLVFMLFLLVFLFAFASSMTLLIFLVIPLAGAMVRVVVFALTLRMLAFFTFVLVGFFLMLGFLVLTTVLALITSDQVKVNLNTLDVCPDQLNGNFLADPVDIASPLSN

SEQ ID NO: 2843 - DNA, 2430 bp, Alloiococcus otitidis
  CDS (1)..(2427)
atggctgaccttacaagtgaattagagaagaagatagtagactcgattggggctcgggacgaccttgaggtaaacgatatagcaagagctctggatatggagtctgctgaagaattcaagcaacttgtcaaggccattgccaagctcgagcgaagacaagaaattatattaaccagtaaaggaacatttattatcaaccaacaaaaaattgacgaagagatacaaggaagatttaaggcaaatgacaagggctttggctttgtcattttagaagattcagaccaagaagatatttttatcccagctaatgccaccaatactgcctttgatggcgaccaggtccaagtcgaaattatcaaggccccggacccgcgcaaggacaaggcagctgaagggaaaatcaccaagattttggagcggaaaaccgaaagtgtgattggtgaattctacccttattcggatgaagaagtaaaagacctagacttatacggttacgtcaagccgagtgtcaagggctatccggacttaaccattcaaatccagaccaagggcttacgtcccgtccagggtgaaattgtcaaagtcgacattacccgctacccccactatacccatgaagatacggtgggacttgtcactgagaccattggccacaaggatgagcctggggtcgacatcttgtcaattgtccacaagcatggcatcccatctgaatttccagaagaagttctggaccaagctcaggaggtgccggaccaaattagtccagaagacctcaaaggccgaaaagacttgcggcaagagaccatcatcaccattgatggggccgatgccaaggacttggatgatgccatccaggtcaaacggctaaacaatggccacttctcccttggggttcatattgccgatgttgcccattacgttcaagaagggacagccatggaccaggaagcctatgaaagagggacttcatcctacttgacagaccgggtgatccctatgctgccccagcgcttgtcgaatgggatttgctccctccatcctggcgtagaccggctaaccttatcctgccagatggaaattgaccaagcaggggaagttgtccaatatgacattggccccagtgtgatccagtccagtcagcggatgacctatcgggacgttaatgccatcttggacgaggatgaccaggccaaaaaagatgagtttgctgatttagtccccatgtttgaagacatggccgacctccaccacattttagaaaacaaacggaagaaaagaggggccatcgactttgaatccactgaagcacaaattgaagtggatgaccaaggccagccaactgacatcaaactcttggaaagagggacgggcgagaagttgattgaatcctttatgctggctgccaatgagaccgtgtcagagcactttaccaaacaacacttgcctatcctctaccgggtccatgagcaaccagatgaggccaaaattcagcgcttcttagaatttatcgccactttaggcattacggtcaaggcctccaaggacagcatttcacccaaagacttgcagaaggtcctagccaaggtagaaggccagcccactcaagtagtggttaacatgctcttgctccggtccatgcaacaagcccggtatgatgttgaccccttaggccactatggcttgggagccgaattttactcccactttacctcccctatccggcggtatccagaccttatcctccaccgcttgatccactactacgatgaagttggccggtctaagaaggatgtcaaaagatgggaggaaaaactgccggaaatcgcagaggctagctcttttgcagaacgccgggccatcgatgctgagcgagaaacggacgaactgaaaaaagtcgaatatatggcagataagataggccaagaatttaagggcatgattgtctccattactggctttggtatgtttatccaattgcccaacacggtggaaggcctggtccatatttccctcttagacgatgacttctatgaatttaatgacgagcacctagtcttagttggacagcggactggcaatatctaccggatcggccaagaaattaccgttaagttgatccgggcagacatccaaagtattcagattgactttgacttggtcagaggtaatgagggccaaaaccgtggtcaagacaagaaagccaagcataagaaaaaagcccacaagcacaaaggtaaaaaaggcaagcatgcgaagggtaagggcaaaaacaaccaccctgaccatggctccggcaaggggaatgacaagaaaaatcaacaaggtcatactgctggcaaaggcaaaaagaaaaacaagaagaaaaagcataaaaacaagaaagataaaaaacacaagcatccctttaaaattcgggagaaaaaataa

SEQ ID NO: 2844 - protein, 809 aa, Alloiococcus otitidis
MADLTSELEKKIVDSIGARDDLEVNDIARALDMESAEEFKQLVKAIAKLERRQEIILTSKGTFIINQQKIDEEIQGRFKANDKGFGFVILEDSDQEDIFIPANATNTAFDGDQVQVEIIKAPDPRKDKAAEGKITKILERKTESVIGEFYPYSDEEVKDLDLYGYVKPSVKGYPDLTIQIQTKGLRPVQGEIVKVDITRYPHYTHEDTVGLVTETIGHKDEPGVDILSIVHKHGIPSEFPEEVLDQAQEVPDQISPEDLKGRKDLRQETIITIDGADAKDLDDAIQVKRLNNGHFSLGVHIADVAHYVQEGTAMDQEAYERGTSSYLTDRVIPMLPQRLSNGICSLHPGVDRLTLSCQMEIDQAGEVVQYDIGPSVIQSSQRMTYRDVNAILDEDDQAKKDEFADLVPMFEDMADLHHILENKRKKRGAIDFESTEAQIEVDDQGQPTDIKLLERGTGEKLIESFMLAANETVSEHFTKQHLPILYRVHEQPDEAKIQRFLEFIATLGITVKASKDSISPKDLQKVLAKVEGQPTQVVVNMLLLRSMQQARYDVDPLGHYGLGAEFYSHFTSPIRRYPDLILHRLIHYYDEVGRSKKDVKRWEEKLPEIAEASSFAERRAIDAERETDELKKVEYMADKIGQEFKGMIVSITGFGMFIQLPNTVEGLVHISLLDDDFYEFNDEHLVLVGQRTGNIYRIGQEITVKLIRADIQSIQIDFDLVRGNEGQNRGQDKKAKHKKKAHKHKGKKGKHAKGKGKNNHPDHGSGKGNDKKNQQGHTAGKGKKKNKKKKHKNKKDKKHKHPFKIREKK

SEQ ID NO: 2845 - DNA, 345 bp, Alloiococcus otitidis
  CDS (52)..(342)
tccgggcagacatccaaagtattcagattgactttgacttggtcagaggtaatgagggccaaaaccgtggtcaagacaagaaagccaagcataagaaaaaagcccacaagcacaaaggtaaaaaaggcaagcatgcgaagggtaagggcaaaaacaaccaccctgaccatggctccggcaaggggaatgacaagaaaaatcaacaaggtcatactgctggcaaaggcaaaaagaaaaacaagaagaaaaagcataaaaacaagaaagataaaaaacacaagcatccctttaaaattcgggagaaaaaataacaaaggaaggagggttctagatgccaaaaggtga

SEQ ID NO: 2846 - protein, 97 aa, Alloiococcus otitidis
MRAKTVVKTRKPSIRKKPTSTKVKKASMRRVRAKTTTLTMAPARGMTRKINKVILLAKAKRKTRRKSIKTRKIKNTSIPLKFGRKNNKGRRVLDAKR

SEQ ID NO: 2847 - DNA, 459 bp, Alloiococcus otitidis
  CDS (1)..(456)
atgccaaaaggtgatggcggactgattacccaaaaccgcaaggccagacacgagtatacagtcctggatacagttgaagctggtatcgtcttacatgggactgagatcaagtccatccgcaaccaccggatcaacttgaaggatggctatgccggtatccgcaacaatgaaatatggttgtataatgtccacatttccccctttgatgaaggcaaccgttttaaccacgacccggttcggaccaggaagttactcttgcaccgcaagcaaattgaccgtctgattggggaagtcaaacaaagtggtattaccctggtccccttaaaggtctacattaaaaatggggtggccaaggtcttactgggcctcgccaagggtaaaaaacaatacgataaaagagaaaccatcaaaagacgggaacaagagcggcggattgaaagagaatacaaaccccgttag

SEQ ID NO: 2848 - protein, 152 aa, Alloiococcus otitidis
MPKGDGGLITQNRKARHEYTVLDTVEAGIVLHGTEIKSIRNHRINLKDGYAGIRNNEIWLYNVHISPFDEGNRFNHDPVRTRKLLLHRKQIDRLIGEVKQSGITLVPLKVYIKNGVAKVLLGLAKGKKQYDKRETIKRREQERRIEREYKPR

SEQ ID NO: 2849 - DNA, 231 bp, Alloiococcus otitidis
  CDS (7)..(228)
aggagcatgattatgacaaaatcggataaagaacttgcggttgaagtggctattgccttaattgaagccaatcctagaagctctgtaaagggggaagatggtaaggaaatcgccctgccttctttggatatttccagtgctagcaatattatccgccacgtttacgatacccttcaaaccttggagtcaggtgaacgtccgctccaatacaagggaccggataaagactaa

SEQ ID NO: 2850 - protein, 74 aa, Alloiococcus otitidis
MIMTKSDKELAVEVAIALIEANPRSSVKGEDGKEIALPSLDISSASNIIRHVYDTLQTLESGERPLQYKGPDKD

SEQ ID NO: 2851 - DNA, 189 bp, Alloiococcus otitidis
  CDS (1)..(186)
atggaaaatattaattactcaaattttattgaagagaaaaaagaggaatacttggaagatattaaatcagatgaaattattgatgaaattactggaggagcttgtccgtggtggaatatttcctgccaacttggaaacacaggaagttattgtacgttaagtgttgagtgtatgcctggatgtcattaa

SEQ ID NO: 2852 - protein, 62 aa, Alloiococcus otitidis
MENINYSNFIEEKKEEYLEDIKSDEIIDEITGGACPWWNISCQLGNTGSYCTLSVECMPGCH

SEQ ID NO: 2853 - DNA, 396 bp, Alloiococcus otitidis
  CDS (55)..(393)
tcgactaccaatataacagaaattcacatgactttttatatgcaagggactaacttgattttacaatccacctcccgatctaaaaagaataataaaaatagttatttattattcttcttcttccctcctatttttgtattccctatcgtagcacctatagctaaaccgacaccgatccctaaagccatattattaattaaactaccaaaagcagaaccaaatattatgcctaaaccaatacaaattccatgtttattttccattattatcctcctagttatttttgaattcactaagttttatatatttacaatccaccatatatttacaattacttcatatccattatataataaaaatgttagatactatataattctaaatactagctattaa

SEQ ID NO: 2854 - protein, 113 aa, Alloiococcus otitidis
MILQSTSRSKKNNKNSYLLFFFFPPIFVFPIVAPIAKPTPIPKAILLIKLPKAEPNIMPKPIQIPCLFSIIILLVIFEFTKFYIFTIHHIFTITSYPLYNKNVRYYIILNTSY

SEQ ID NO: 2855 - DNA, 396 bp, Alloiococcus otitidis; identical to SEQ ID NO: 2853
  CDS (28)..(393)

SEQ ID NO: 2856 - protein, 122 aa, Alloiococcus otitidis
MTFYMQGTNLILQSTSRSKKNNKNSYLLFFFFPPIFVFPIVAPIAKPTPIPKAILLIKLPKAEPNIMPKPIQIPCLFSIIILLVIFEFTKFYIFTIHHIFTITSYPLYNKNVRYYIILNTSY

SEQ ID NO: 2857 - DNA, 201 bp, Alloiococcus otitidis
  CDS (1)..(198)
atgaatttagaaaaagaaaattatcacttgaaccaggaaaaggaattagaaaaaattgttaaaattgattcaatagaagaaattgataaagctaatggagcttcagcactttcgtgtacagttgttggaactttaattggagctagtgtaactctttgcccaacgacaaaatgttcaaaggaatgtgggagaagaaattaa

SEQ ID NO: 2858 - protein, 66 aa, Alloiococcus otitidis
MNLEKENYHLNQEKELEKIVKIDSIEEIDKANGASALSCTVVGTLIGASVTLCPTTKCSKECGRRN

SEQ ID NO: 2859 - DNA, 162 bp, Alloiococcus otitidis
  CDS (1)..(159)
atggaaaataaacatggaatttgtattggtttaggcataatatttggttctgcttttggtagtttaattaataatatggctttagggatcggtgtcggtttagctataggtgctacgatagggaatacaaaaataggagggaagaagaagaataataaataa

SEQ ID NO: 2860 - protein, 53 aa, Alloiococcus otitidis
MENKHGICIGLGIIFGSAFGSLINNMALGIGVGLAIGATIGNTKIGGKKKNNK

SEQ ID NO: 2861 - DNA, 423 bp, Alloiococcus otitidis
  CDS (55)..(420)
gacggggttccccttgacgctttcggaccacaaccgtgtcgacttcccaatggcttgaggacgttcttcaatcgaagggcccgacgtctttcgattgggacgaccccggcggtggtcttggtaggccttggcatgaacgtcggcgaaatagatgtcgtcataataagtataagtctttccctggtgtttctgttggcgtttttgggggacgaaaccggtctagatggcattgtggatggtttgccgacagcgcccgaacagcctggcaatctgccgattggcataaccttctgctatatatgcttcaattttatgcattacggctggagtcaaatgtgttcttttagggggaagtgtgctatcatgggcttgagtcatgtgaattctccttatattaattggtttagtcgactaccaatataa

SEQ ID NO: 2862 - protein, 122 aa, Alloiococcus otitidis
MRTFFNRRARRLSIGTTPAVVLVGLGMNVGEIDVVIISISLSLVFLLAFLGDETGLDGIVDGLPTAPEQPGNLPIGITFCYICFNFMHYGWSQMCSFRGKCAIMGLSHVNSPYINWFSRLPI

SEQ ID NO: 2863 - DNA, 2712 bp, Alloiococcus otitidis
  CDS (1)..(2709)
atgaagtataaatttatagacatagttagaaaaaatgttacagataattggttaaacattcaaatatatacccctaaagaatacaggattaattttaatattaataacttaaaaaatcaactttatcaagaaatagaaagtatagtacttcagctttactatgaatattttgatgaatttaggaaatgtacaatttataaggaagaaaatgacaataaattgaaattgttttacgaaaaaatatcttgtgatcaatttaaagaagaaattgttagctcatttccagagctagataaatatataaagaaaagagttgacttatttaataattatataaataaagtgttaaaagacttagaagtttggtgtatagataatagctttgaaacactagataatataaaatgttttagtggcgacagtcataatgggggacaatatgtatgtgaaataactatagataaaaaaaatgtattttactataaacctagaagtagcgaattagaattaaggttcaacaaacttttagttaggctaatggatgttgatgattttgtattattcagtagaggggatttttctatacaaaaatcgataacatatgtaagcccaaagagtaaagaagatattgaaaaatattattatcacttagggataatatcagctttattttatttttttaacagtacagatatgcattatgaaaatatgataatacataaagatttaccatatttttttgatttagaaacaatcacagctttaaacaataattatctaggaaatgaaataaaaaccattaaaaattttttgaataattcaatattaggaagcaatatttttccagctcctttactatctaataatattgatatatcagttattaccggtgttgattggaaagaaaaaggaaacttaaattatggaattaatatacaaaatgatggtactgataatattaaaatagaaaaaattagtagtgctttggaaaaaggaaataatgaaattgaatttaatggggaaaaaataaatccaattaattatctcgaaaatattgttgaaggatttaaatatgttggtgaaaaaattattaacaataaagacaaatttttagatttaatgtttaatgttattcaagatcaaaagataaggcaaataatacggcctactaatacatatgcaaagtttataaaaatatctttggaaccatattatctacaaaacgacagatttagaaattcgatttttaaaatttttaaagagggaatgtacaaatcatgcaaagcaatgattaattatgaaattaaaagtatgagaatgggagatataccagtgcttttttcagatgctgattctcataacttatatgatagttatggtaatgtgttagcaaaagattttttttctactacttgtaacgaaatgataaaatctaaagtagataacttttcaaaaaatgaaatgaataagcaaattgcattaatgaaatcaagtgtctatgtagcatgtttcaacaaatattctactagcaattttcctgatttaattgataaacgggaccttaaaaaagattactatcaattatgtatagactatttcagatctttttctaaagaagatgattatttctttaatatcaatgtaataggagacggacctaaattagctttatggcttacggattttagcttatatgagtctggcggaattttattattattatacttgaaatcagaattaggattatcaaataaatttttttatgaaatcacacagacagtgtataaattaaacactcaaattgacaagagtttgaatgcttttaatgggattggttcggaattatactttctatattctttttataggaatgagccttcattgttttatggtaagaaaataatagaaatacttaatgagattgaaaaaaagataactgtcgagactgtaaaagaatttgactattttagtggtctagctggagtactcgctgttttatcaaatatgtataatagcatggtgaccgatcagaaaaataaagatattgagatggaaaataaaacacttaatttaattaatataatccaaaaattaatgcttgataattatacaaagataatagataattatcaagcaggacttgcacatggattagctggtatttattattctttaggtgtaagttatcaatgtaataaaaaaaataaaatcaaaaaaatgtgcacggatttaattgatcaagaagaaaaatattattcagaaggagcaaatgactacttagatcctagggatcaatcagtagggaatttttatttatgctatggtatagttggtgttttgttagttagaatcgaactttatcgaataggcctcttagacaaaactataattgaagacaaagtagcgaaaattttagataaattaaaaagtaaaatcgatttttcttttatgacttattcattatgtcatggaattgctagtattatagagttaatgatatcaattcaattgataagtgaaaataaaagtgactgtaaagaaatattagataatttaattgttgaggaaatgagtaattttaggaatgggtacggtaataatgttgatattgattcttttatgaatggaagaatgggtaaaatatatgcagtacttcgaacatgtttaccaaaaataccttcttttcctctattaaagtttaatgtttattaa

SEQ ID NO: 2864 - protein, 903 aa, Alloiococcus otitidis
MKYKFIDIVRKNVTDNWLNIQIYTPKEYRINFNINNLKNQLYQEIESIVLQLYYEYFDEFRKCTIYKEENDNKLKLFYEKISCDQFKEEIVSSFPELDKYIKKRVDLFNNYINKVLKDLEVWCIDNSFETLDNIKCFSGDSHNGGQYVCEITIDKKNVFYYKPRSSELELRFNKLLVRLMDVDDFVLFSRGDFSIQKSITYVSPKSKEDIEKYYYHLGIISALFYFFNSTDMHYENMIIHKDLPYFFDLETITALNNNYLGNEIKTIKNFLNNSILGSNIFPAPLLSNNIDISVITGVDWKEKGNLNYGINIQNDGTDNIKIEKISSALEKGNNEIEFNGEKINPINYLENIVEGFKYVGEKIINNKDKFLDLMFNVIQDQKIRQIIRPTNTYAKFIKISLEPYYLQNDRFRNSIFKIFKEGMYKSCKAMINYEIKSMRMGDIPVLFSDADSHNLYDSYGNVLAKDFFSTTCNEMIKSKVDNFSKNEMNKQIALMKSSVYVACFNKYSTSNFPDLIDKRDLKKDYYQLCIDYFRSFSKEDDYFFNINVIGDGPKLALWLTDFSLYESGGILLLLYLKSELGLSNKFFYEITQTVYKLNTQIDKSLNAFNGIGSELYFLYSFYRNEPSLFYGKKIIEILNEIEKKITVETVKEFDYFSGLAGVLAVLSNMYNSMVTDQKNKDIEMENKTLNLINIIQKLMLDNYTKIIDNYQAGLAHGLAGIYYSLGVSYQCNKKNKIKKMCTDLIDQEEKYYSEGANDYLDPRDQSVGNFYLCYGIVGVLLVRIELYRIGLLDKTIIEDKVAKILDKLKSKIDFSFMTYSLCHGIASIIELMISIQLISENKSDCKEILDNLIVEEMSNFRNGYGNNVDIDSFMNGRMGKIYAVLRTCLPKIPSFPLLKFNVY

SEQ ID NO: 2865 - DNA, 474 bp, Alloiococcus otitidis
  CDS (7)..(471)
atttttttgatttttttgatttttacaccagctttttgttcttctcttgaatcggtcattatgatatcttgtattctttcattgtttattttaaattggtttaagctaataatagatcccaggataccatccatactttggaagaaatatattaaaattgtattcaaaaaaaatatagtacctacactaataataatgttcgataaaataactaaaagaataatgaccaaaggcataaacattaccatcatcgaggagattatgccatatatagattctgtcttattcttattctcaaaagattttattgaagaattatatatgttgaatatttttgctttaaaaaaatctgataaacctatagattgtatagcatacatggaagtcaaagtctcatattctttagattggagatcggattcatgggctatcatttttcgacttaataccattattttcttttgtaatgggtaa

SEQ ID NO: 2866 - protein, 155 aa, Alloiococcus otitidis
MIFLIFTPAFCSSLESVIMISCILSLFILNWFKLIIDPRIPSILWKKYIKIVFKKNIVPTLIIMFDKITKRIMTKGINITIIEEIMPYIDSVLFLFSKDFIEELYMLNIFALKKSDKPIDCIAYMEVKVSYSLDWRSDSWAIIFRLNTIIFFCNG

SEQ ID NO: 2867 - DNA, 2142 bp, Alloiococcus otitidis
  CDS (22)..(2139)
tgtttattaaggagaggatatatgtttaaaaagagtgtaccgtatgtacaacaaatgcaagaaacagaatgtggactttgttgcgtaaatatgatattaaaatattatggatcaagagttaatatatcgtttctaaaaaataattttgaaataggtagagatggaatgtcagcaaaagaaattggttcattactatctcaatttaattttaaagttaatttttataaggctaatgttgaaggtttaaaagatgtatctgactcaccgtgtattttatactgggacaatattcattttgttattttagagaagattattaatcaaaaatattatatagttgatcctaaaataggcagacaagttcttgataaaaaacaaatgactgatcactttactaaatttgtcataaaaccaattatcaaaggagagataataaagaagaaggataaaaatacccaaaagaatttatattacacatttttttcaaaaaataaacttaggttttttattataacgatactttctttattagcatattttgttgcattgattgctccagcaattttgcagaaagttatagatgatattgttgaaggagactttattttattagacgaatatctaaaaatagctggaataattattttattatacgctatttttagatattgtagaagtatacaaactatttctttttcaaaattaatggatgaatatacgtataaggaagtgatagataaattattttccgtacctttcaatttctttttaacacgtaattctagtgacttgttatatagattatctttattaaaatcaaatagaaattttttgatcgatcaaataattgtttctatatttaatgtaataaacttagctattttactagttataatattttttattgatataaaaatattattaattgtagtagcaattagtttactagcgtttctagtgctttacccattacaaaagaaaataatggtattaagtcgaaaaatgatagcccatgaatccgatctccaatctaaagaatatgagactttgacttccatgtatgctatacaatctataggtttatcagatttttttaaagcaaaaatattcaacatatataattcttcaataaaatcttttgagaataagaataagacagaatctatatatggcataatctcctcgatgatggtaatgtttatgcctttggtcattattcttttagttattttatcgaacattattattagtgtaggtactatattttttttgaatacaattttaatatatttcttccaaagtatggatggtatcctgggatctattattagcttaaaccaatttaaaataaacaatgaaagaatacaagatatcataatgaccgattcaagagaagaacaaaaagctggtgtaaaaatcaaaaaaatcaaaaaaattcaatttaaaaatgtatcttacaagtatcctggtcaagaagaatatatacttagtgatataaatttaactataaatatgtcagataaaattggtatagtaggaaagaccggaagtggtaaaacaactttactaagtttgatgatgggtattattaaaccaaataaaggtgagatactagttaatggatataatatagatgatattgatattaaaacatttaggaaaaaaataggttatgttccacaagaatcttttattatatcatcttctataaaggataatattttaatggaacgtgaggtagatgattcgttattttataatgcgattggaatagcacaattaggagaagatatctataaactccctatgaaagaaaatactttagtatctgaagatggaagcaatttttctggaggacaaagacaacggttaggcatagctagagcgctattagaaaatcctgatcttattgtttttgatgaagcaacaagctcaattgacaattatactcagcaaaagatatctgactctattttaaaaatggagtgtacacaattattagtttcgcacagattgtcaactattgaaaatagtgacaaaattattgtaattgataagggaaaaattgttgaaagaggttcctcatatgaattacttcaagaaaagggactttattacagactatatactggagagatataa

SEQ ID NO: 2868 - protein, 706 aa, Alloiococcus otitidis
MFKKSVPYVQQMQETECGLCCVNMILKYYGSRVNISFLKNNFEIGRDGMSAKEIGSLLSQFNFKVNFYKANVEGLKDVSDSPCILYWDNIHFVILEKIINQKYYIVDPKIGRQVLDKKQMTDHFTKFVIKPIIKGEIIKKKDKNTQKNLYYTFFSKNKLRFFIITILSLLAYFVALIAPAILQKVIDDIVEGDFILLDEYLKIAGIIILLYAIFRYCRSIQTISFSKLMDEYTYKEVIDKLFSVPFNFFLTRNSSDLLYRLSLLKSNRNFLIDQIIVSIFNVINLAILLVIIFFIDIKILLIVVAISLLAFLVLYPLQKKIMVLSRKMIAHESDLQSKEYETLTSMYAIQSIGLSDFFKAKIFNIYNSSIKSFENKNKTESIYGIISSMMVMFMPLVIILLVILSNIIISVGTIFFLNTILIYFFQSMDGILGSIISLNQFKINNERIQDIIMTDSREEQKAGVKIKKIKKIQFKNVSYKYPGQEEYILSDINLTINMSDKIGIVGKTGSGKTTLLSLMMGIIKPNKGEILVNGYNIDDIDIKTFRKKIGYVPQESFIISSSIKDNILMEREVDDSLFYNAIGIAQLGEDIYKLPMKENTLVSEDGSNFSGGQRQRLGIARALLENPDLIVFDEATSSIDNYTQQKISDSILKMECTQLLVSHRLSTIENSDKIIVIDKGKIVERGSSYELLQEKGLYYRLYTGEI

SEQ ID NO: 2869 - DNA, 2592 bp, Alloiococcus otitidis
  CDS (1)..(2589)
atggaactaaaagcaaattttttcaataattttaattatgaacaaaagaaaaaaatatatggaactaaaaataataaattctggtttatagaagtagatataatagagttttatttaaaaaaagttgataaatctattaaagaatatttctatgataatttgaggtattttcaaagcaaaactattctatctgaaatgcgacttttgactgattatttaaattatgtatttaagaatagtaaatatgattcatttataaatttttggaatgattataaaagaaaatttatggaaaatagtgaagttaaatttactttttttagtcagttcaaggaattatttcgccttttgaataagttttatagtagccaaataaactatattaattttatagttaacgatgttaacgagcataaaaataatttaaaaacaacttttaatataagtaatgtatatctaaaaagtattaaattaggctttggagatatgcacgaaggtggatattctacagcattgttgaatatcagtggaaagaaaatcatgctaaaaagaggagataatcatacaaaattagtgattgatttatacaacaattttcttgtttataatggattagaaaaaattcaatttaaaagtttagaatttgaagaatattattatgaaaaatattttgaaaaagacattattacaaatgtaagtagtctaatgcaaagcataggggtaatggtattcttagcatatttattgggactaactgatcttcattatgataatattatgatatcaaataacacattaattcctatagattgtgagactatttttaatactaaaaaaaataatagtaacagttatgattttagtggctctgtattcacctcatttttattaccttttaaaagaattaacaattgcttattgtcaggaattagttccgaaaacaatgtgtcactagaaaaaaaggattataagttggaaataagccagtcagggctaattgtaaaagaaaactcgggaaaaaaacttcaaagatcaattagttcattacaagggaataatctatatgattatacagatttaattgtaaaatcatttgaaaattcttatttatattttatccataatgaagagtggatcataagcaaaatagaaaaaatgatatccgataaaaagcatagaattttgaagaaaaatacatctgaatatattgaagcgttgattcaatcttactacccatttttaatggttgatactattgacagatttaatttttttaataagaagaataagtttagtaaaaaagaaatatatactttgatggacaatttagttccaacattttatgaagaaataaaaattgataaacattattatgacatgttttctagagaggacatggaaatacagcgacaacttattaaatcttctataaattttgaattgtttgaaaatcaaatggtcaatcataaccataattctagttcaaatgaaaaagattattatctttatttatataaagagttgattgaagccacttcagaattattttggatagatacaattacctataaaagcaatactaaagaaataacggaacttataaaagtaccaagtactatttatgcaggaaaatctggtatatgtctatttttattagaatatgcctatgaaaataacttgttagataaggatttaaaaatacatattcttatgaaggatatttatagatcttttataaaaatagtaaataatccatatagttcttgtggtatatatgatgggacctctggattgttttatttaatatataaatataaccaatatactaatagattcaataaaaatgaattattatcatttctaaagttgatgataaaaaatgtacaatatgataaacagttagatataatgtcagggcaagctgggctactaaagctattgatttacttgtacaaaaatggtgaaaaatatgattggattaaagaaggggttattaatatccaaagcattattattgataaaataaatagtaatgaggttttacacaaaaaatatttgggttattctcatggattagttggaataatttctgttctcgttgaaagtactaaaataaataaaatatttaaaatagaaaacattgttgaaaattttgttacttacctatctagtgtaatggaagaaaataaggggatacctagtactatagaaaagttatctttctataatagttggtgtcatgggaattcgggatttttactgggattattcaacatttacaaaatatataaaagcgatatattgctagaaattatgtatgagcttattaaaatattatctaaagatagaatggataatttcaagttatgccatggggatcttggtaattatttgatttgctataatgtgtcgttgtatcttgatgatttatattacattaagttatttaaaacaaaactagacatgcttgttcataaattgaatgtacaagattttaaattttataacaaaaatattatggttggcttatctggtttatattattggaaattattaaattgggatatgagtaatcaactagatattatatag

SEQ ID NO: 2870 - protein, 863 aa, Alloiococcus otitidis
MELKANFFNNFNYEQKKKIYGTKNNKFWFIEVDIIEFYLKKVDKSIKEYFYDNLRYFQSKTILSEMRLLTDYLNYVFKNSKYDSFINFWNDYKRKFMENSEVKFTFFSQFKELFRLLNKFYSSQINYINFIVNDVNEHKNNLKTTFNISNVYLKSIKLGFGDMHEGGYSTALLNISGKKIMLKRGDNHTKLVIDLYNNFLVYNGLEKIQFKSLEFEEYYYEKYFEKDIITNVSSLMQSIGVMVFLAYLLGLTDLHYDNIMISNNTLIPIDCETIFNTKKNNSNSYDFSGSVFTSFLLPFKRINNCLLSGISSENNVSLEKKDYKLEISQSGLIVKENSGKKLQRSISSLQGNNLYDYTDLIVKSFENSYLYFIHNEEWIISKIEKMISDKKHRILKKNTSEYIEALIQSYYPFLMVDTIDRFNFFNKKNKFSKKEIYTLMDNLVPTFYEEIKIDKHYYDMFSREDMEIQRQLIKSSINFELFENQMVNHNHNSSSNEKDYYLYLYKELIEATSELFWIDTITYKSNTKEITELIKVPSTIYAGKSGICLFLLEYAYENNLLDKDLKIHILMKDIYRSFIKIVNNPYSSCGIYDGTSGLFYLIYKYNQYTNRFNKNELLSFLKLMIKNVQYDKQLDIMSGQAGLLKLLIYLYKNGEKYDWIKEGVINIQSIIIDKINSNEVLHKKYLGYSHGLVGIISVLVESTKINKIFKIENIVENFVTYLSSVMEENKGIPSTIEKLSFYNSWCHGNSGFLLGLFNIYKIYKSDILLEIMYELIKILSKDRMDNFKLCHGDLGNYLICYNVSLYLDDLYYIKLFKTKLDMLVHKLNVQDFKFYNKNIMVGLSGLYYWKLLNWDMSNQLDII

SEQ ID NO: 2871 - DNA, 768 bp, Alloiococcus otitidis
  CDS (34)..(765)
tcaactagatattatatagagagggctattataatggaaagtaaatatattatcaaaattgataaattaagtaaaagctataagcaaaaggatgctttaaaagatatttcgttgaatatttttagagggagcgtaaccggcctttttggagaaaacggggctggaaagacaactctgatgaagctgctaactaatcaaattaaagcggataaaggtagtatcgtgattaacgggtcacctttaatttttaattctaaagttaatgctcaaattggttgtcttcttgaaaaaccaccattatacccttatttaacagctgaacaacatttatcattgtttaaaacactgaaatacgatggacaagatttatcaaccaaagaattaatagaagtttatgatctgactaaatttaaagatgtaaaagctaaagaatattctctaggaatgagtcagcgactaggacttgcaattgcggaactgtcttgtgatgacatccttatattagacgaaccttttaatggcttagatcccgtgagtgttaatagattaagagaacgtatattgactttaaaaaacaaaggagtgacgattattctgtctagtcatttgattagggagttagaaaatgtcatcgacaatttgataattatttctcaaggtaggttgctagattcgattagtatagatgattttatgaatggtaaagatacttctttagaacacgagatattaaaaataatggagggtcaaaatggcgaacttatttaa

SEQ ID NO: 2872 - protein, 244 aa, Alloiococcus otitidis
MESKYIIKIDKLSKSYKQKDALKDISLNIFRGSVTGLFGENGAGKTTLMKLLTNQIKADKGSIVINGSPLIFNSKVNAQIGCLLEKPPLYPYLTAEQHLSLFKTLKYDGQDLSTKELIEVYDLTKFKDVKAKEYSLGMSQRLGLAIAELSCDDILILDEPFNGLDPVSVNRLRERILTLKNKGVTIILSSHLIRELENVIDNLIIISQGRLLDSISIDDFMNGKDTSLEHEILKIMEGQNGELI

SEQ ID NO: 2873 - DNA, 762 bp, Alloiococcus otitidis
  CDS (406)..(759)
tggagggtcaaaatggcgaacttatttaactttgaatattacaaactaaacaagcaaaaaagatttcttattctaattgcgacgacatttatttttcaattactaatggcaatttttataaagtataatgaagacttcatgtcctatgaaagagctattcagtactccttccttgcaccttatgtcattaacgttagtattatttttttggcttgtacaatgttaacggaagattttgaacatcttacaattgtgccaataaaaatgaaatacccaaatctttcaaagttgatttcagttaaattaattctgatattatttacacatatagtcttattgtttttaagtgcttgttttactatacttcttgcatatacactgttaaattatgatcttaatttagaaatgatttcagatgtttatctttatagcctaactatgattctgccaattgctactattatacttttggcagctatcgctagcttaatcacaaaaaaagaaaaaactggtttaattatttctctgattatttacctactttacggcttaggaacaggtttaaattttttaattattcagaatctccctgtctttaagtatggtattgttaatcttatgaatttatctaaccaattaatagattctaggtatattgaaatgacacaactaagtcatgtcaatatgatcactgtcataattgtgtatttaattattgagtctattatactttttatactatcaaaggaaatagaattataa

SEQ ID NO: 2874 - protein, 118 aa, Alloiococcus otitidis
MISDVYLYSLTMILPIATIILLAAIASLITKKEKTGLIISLIIYLLYGLGTGLNFLIIQNLPVFKYGIVNLMNLSNQLIDSRYIEMTQLSHVNMITVIIVYLIIESIILFILSKEIEL

SEQ ID NO: 2875 - DNA, 762 bp, Alloiococcus otitidis; identical to SEQ ID NO: 2873
  CDS (265)..(759)

SEQ ID NO: 2876 - protein, 165 aa, Alloiococcus otitidis
MKYPNLSKLISVKLILILFTHIVLLFLSACFTILLAYTLLNYDLNLEMISDVYLYSLTMILPIATIILLAAIASLITKKEKTGLIISLIIYLLYGLGTGLNFLIIQNLPVFKYGIVNLMNLSNQLIDSRYIEMTQLSHVNMITVIIVYLIIESIILFILSKEIEL

SEQ ID NO: 2877 - DNA, 762 bp, Alloiococcus otitidis; identical to SEQ ID NO: 2873
  CDS (13)..(759)

SEQ ID NO: 2878 - protein, 249 aa, Alloiococcus otitidis
MANLFNFEYYKLNKQKRFLILIATTFIFQLLMAIFIKYNEDFMSYERAIQYSFLAPYVINVSIIFLACTMLTEDFEHLTIVPIKMKYPNLSKLISVKLILILFTHIVLLFLSACFTILLAYTLLNYDLNLEMISDVYLYSLTMILPIATIILLAAIASLITKKEKTGLIISLIIYLLYGLGTGLNFLIIQNLPVFKYGIVNLMNLSNQLIDSRYIEMTQLSHVNMITVIIVYLIIESIILFILSKEIEL

SEQ ID NO: 2879 - DNA, 1368 bp, Alloiococcus otitidis
  CDS (169)..(1365)
caaatgaaaggaaaagattttaagtttatattcttttcgatcctaggaatcatcttcttcctagtccccatccccattaacggtgagtcaaggattctcttgtcccatgccaccaactttgtcgaggaaaatttcattggggccttcctagccttcacccaagtggtcatgtggattatcttgattgcaaccattgtctttatctttgtcaagacaggcaacaagtttatcgatggcctgtttaaaaccaaccccattaatacaatcttgcggattgtgggttcctttttgtacctcatggtcatgaacaattggtttgctgaccaagcctgggcccaatatattttagaccctgataccggtggggtcttggcgggcgaaggaggccttttaaccaccctctttatcaccttcttcgtgggtattatcgggatccccttcttgacccactttgggacggtggaatttttggctgttctaaccgaaccttttatggagtccctctttaaaatccctggagccgctacggtcgatgccttgaccagttttgtcggcgatgggaccttgggcttgattgtaactgacaaccagtaccgcaggggttactacacccaacgtcaggcctacctcattgccaccaacttctccatcgtgggaattgcctttgccaccgcagttgcagaggaattaggcttgggacatatcttcccccttttttacttaaccctatttttaaccgtcatcctaattgccatgattaccgcccgtttccccttaaaaaaattcaaggacgaatattacggcgaccaaaaacaacaaaaaaatgacattgtagttcctgaaggcaaaagtcggcttggctttgcctatgaacaagcaaccgaccaagcagaatccagaggctttttggaagccatggcttatgcctttcaagagatcgccaacatctatgtcagcctactgcctattattatggcggttggtgtgctagcattaaccatcattgagcacacccctatttttgaaatcatcagtgttcccctagtctacttgtatgacttcctgggctttccaagtgacacagctgccttaatggggccagcttccattgtgggcttagctgatatgtacctccccactgtcttcattacccaatcagcttcccaggctgcccgcttctttatcggtgttctctctttcacccaactcatcttcctcgccgaaacgggtatggtcttggtggacaccaaaattggctttaactttcttgacgtcatctgggtctttatctaccgaaccctcttatccatcccaatcctctacctttttgtcctcttctatacccaactgggcatcctgaccctatag

SEQ ID NO: 2880 - protein, 399 aa, Alloiococcus otitidis
MWIILIATIVFIFVKTGNKFIDGLFKTNPINTILRIVGSFLYLMVMNNWFADQAWAQYILDPDTGGVLAGEGGLLTTLFITFFVGIIGIPFLTHFGTVEFLAVLTEPFMESLFKIPGAATVDALTSFVGDGTLGLIVTDNQYRRGYYTQRQAYLIATNFSIVGIAFATAVAEELGLGHIFPLFYLTLFLTVILIAMITARFPLKKFKDEYYGDQKQQKNDIVVPEGKSRLGFAYEQATDQAESRGFLEAMAYAFQEIANIYVSLLPIIMAVGVLALTIIEHTPIFEIISVPLVYLYDFLGFPSDTAALMGPASIVGLADMYLPTVFITQSASQAARFFIGVLSFTQLIFLAETGMVLVDTKIGFNFLDVIWVFIYRTLLSIPILYLFVLFYTQLGILTL

SEQ ID NO: 2881 - DNA, 1368 bp, Alloiococcus otitidis; identical to SEQ ID NO: 2879
  CDS (4)..(1365)

SEQ ID NO: 2882 - protein, 454 aa, Alloiococcus otitidis
MKGKDFKFIFFSILGIIFFLVPIPINGESRILLSHATNFVEENFIGAFLAFTQVVMWIILIATIVFIFVKTGNKFIDGLFKTNPINTILRIVGSFLYLMVMNNWFADQAWAQYILDPDTGGVLAGEGGLLTTLFITFFVGIIGIPFLTHFGTVEFLAVLTEPFMESLFKIPGAATVDALTSFVGDGTLGLIVTDNQYRRGYYTQRQAYLIATNFSIVGIAFATAVAEELGLGHIFPLFYLTLFLTVILIAMITARFPLKKFKDEYYGDQKQQKNDIVVPEGKSRLGFAYEQATDQAESRGFLEAMAYAFQEIANIYVSLLPIIMAVGVLALTIIEHTPIFEIISVPLVYLYDFLGFPSDTAALMGPASIVGLADMYLPTVFITQSASQAARFFIGVLSFTQLIFLAETGMVLVDTKIGFNFLDVIWVFIYRTLLSIPILYLFVLFYTQLGILTL

SEQ ID NO: 2883 - DNA, 687 bp, Alloiococcus otitidis
  CDS (298)..(684)
cccctgcggtactggttgtcagttacaatcaagcccaaggtcccatcgccgacaaaactggtcaaggcatcgaccgtagcggctccagggattttaaagagggactccataaaaggttcggttagaacagccaaaaattccaccgtcccaaagtgggtcaagaaggggatcccgataatacccacgaagaaggtgataaagagggtggttaaaaggcctccttcgcccgccaagaccccaccggtatcagggtctaaaatatattgggcccaggcttggtcagcaaaccaattgttcatgaccatgaggtacaaaaaggaacccacaatccgcaagattgtattaatggggttggttttaaacaggccatcgataaacttgttgcctgtcttgacaaagataaagacaatggttgcaatcaagataatccacatgaccacttgggtgaaggctaggaaggccccaatgaaattttcctcgacaaagttggtggcatgggacaagagaatccttgactcaccgttaatggggatggggactaggaagaagatgattcctaggatcgaaaagaatataaacttaaaatcttttcctttcatttgttatgtaaaacctcctatagtgcttgtggtggctctctatgaacaaacaccacacttttgtcaaaaaagttttttacaattataa

SEQ ID NO: 2884 - protein, 129 aa, Alloiococcus otitidis
MTMRYKKEPTIRKIVLMGLVLNRPSINLLPVLTKIKTMVAIKIIHMTTWVKARKAPMKFSSTKLVAWDKRILDSPLMGMGTRKKMIPRIEKNINLKSFPFICYVKPPIVLVVALYEQTPHFCQKSFLQL

SEQ ID NO: 2885 - DNA, 687 bp, Alloiococcus otitidis; identical to SEQ ID NO: 2883
  CDS (193)..(684)

SEQ ID NO: 2886 - protein, 164 aa, Alloiococcus otitidis
MIKRVVKRPPSPAKTPPVSGSKIYWAQAWSANQLFMTMRYKKEPTIRKIVLMGLVLNRPSINLLPVLTKIKTMVAIKIIHMTTWVKARKAPMKFSSTKLVAWDKRILDSPLMGMGTRKKMIPRIEKNINLKSFPFICYVKPPIVLVVALYEQTPHFCQKSFLQL

SEQ ID NO: 2887 - DNA, 687 bp, Alloiococcus otitidis; identical to SEQ ID NO: 2883
  CDS (16)..(684)

SEQ ID NO: 2888 - protein, 223 aa, Alloiococcus otitidis
MSVTIKPKVPSPTKLVKASTVAAPGILKRDSIKGSVRTAKNSTVPKWVKKGIPIIPTKKVIKRVVKRPPSPAKTPPVSGSKIYWAQAWSANQLFMTMRYKKEPTIRKIVLMGLVLNRPSINLLPVLTKIKTMVAIKIIHMTTWVKARKAPMKFSSTKLVAWDKRILDSPLMGMGTRKKMIPRIEKNINLKSFPFICYVKPPIVLVVALYEQTPHFCQKSFLQL

SEQ ID NO: 2889 - DNA, 132 bp, Alloiococcus otitidis
  CDS (1)..(129)
atgggcgatcccagttcagatctagcagaagctacttacgcagctaaagctaagttagaatttttttcgtttgcagttaaatttaaactgaatgcgttgatgggcagacgcaaccctgccaaaacgcagtaa

SEQ ID NO: 2890 - protein, 43 aa, Alloiococcus otitidis
MGDPSSDLAEATYAAKAKLEFFSFAVKFKLNALMGRRNPAKTQ

SEQ ID NO: 2891 - DNA, 1200 bp, Alloiococcus otitidis
  CDS (34)..(1197)
aaaaccaaaaaacacattgaaaggaagatcattatgactcaactcaatcttacactagacgccaataaattaacagacgcaattttaaattgtgatctggatcaagtgatgaaatccaccttagtcacggtcttaaacgcttatatggagtctgagcgcgaccaatatatgaaaagcaagcggtatgagcgagatgaagatcgatgcgattaccgcaatgggtattacgagcgagatttcaccacgaaaatcggcaccctcaaactcaacgtgcccagaacgcggtcaggcgacttccatacccaattatttgaactcaatcagcggatggatcaaggcttattggctaccatctttgaaatgtacgtcaatggcgtctccacccgcaaaatgaccaaagttgttgaatccctttgtggtcaaaaggtctccaaatcgttcgtctccgatgtcaataaacacctagacaaggatgtctttaactttcaaaagcgatcgctcacgcatagcgatttccggtatatttatgtcgatgccatgtatataaaggtccgagaggataaccgggtggtgtccaaagccctttacatcgcccaaggagtcaatgatgagaataggcgagaaatcatcgggtttaaagtggctgggcaagagtcaacggaaagttggcggtcgttcttcctcgatttaaaagccagaggcattgatacgccgaaaatggtgatttcagatgcccatgctggcttacgcaaagccattcaagaatgttttgtcaacaccacttggcaacgctgtaccttccacttattaagcaatatcacggatgccttgccgaagaccacggaccgagtcatccgggatcgcttccaagcggttttattttccagaacccagcaggaagctcgtgaacggaaacaggctttggaggctgagttcgaagaccaagcgaagctggccaaagccttgaatctattagatgagggctttgaagatgccattcagtatcaaattgagccttctacttaccatatgtctttgagaacaaccaattctattgaacgagtcaaccgtgaaattcgacgtcgggaaagagtggtggggattttccccaatatcaaatccgcagagcggttagcgggctcggtcttattgaacctacaggagaattgggaagctcagaactatcgatttttacgatag

SEQ ID NO: 2892 - protein, 388 aa, Alloiococcus otitidis
MTQLNLTLDANKLTDAILNCDLDQVMKSTLVTVLNAYMESERDQYMKSKRYERDEDRCDYRNGYYERDFTTKIGTLKLNVPRTRSGDFHTQLFELNQRMDQGLLATIFEMYVNGVSTRKMTKVVESLCGQKVSKSFVSDVNKHLDKDVFNFQKRSLTHSDFRYIYVDAMYIKVREDNRVVSKALYIAQGVNDENRREIIGFKVAGQESTESWRSFFLDLKARGIDTPKMVISDAHAGLRKAIQECFVNTTWQRCTFHLLSNITDALPKTTDRVIRDRFQAVLFSRTQQEARERKQALEAEFEDQAKLAKALNLLDEGFEDAIQYQIEPSTYHMSLRTTNSIERVNREIRRRERVVGIFPNIKSAERLAGSVLLNLQENWEAQNYRFLR

SEQ ID NO: 2893 - DNA, 240 bp, Alloiococcus otitidis
  CDS (1)..(237)
atggcatcttcaaagccctcatctaatagattcaaggctttggccagcttcgcttggtcttcgaactcagcctccaaagcctgtttccgttcacgagcttcctgctgggttctggaaaataaaaccgcttggaagcgatcccggatgactcggtccgtggtcttcggcaaggcatccgtgatattgcttaataagtggaaggtacagcgttgccaagtggtgttgacaaaacattcttga

SEQ ID NO: 2894 - protein, 79 aa, Alloiococcus otitidis
MASSKPSSNRFKALASFAWSSNSASKACFRSRASCWVLENKTAWKRSRMTRSVVFGKASVILLNKWKVQRCQVVLTKHS

SEQ ID NO: 2895 - DNA, 273 bp, Alloiococcus otitidis
  CDS (49)..(270)
ttcccccattgttattccccctcttgtattcgatcgatcaactcttgcatgatgactccaactgaatcctggaaagtcaagtcaaccggaatccgaattcgtttaatggcctcccggttgataaccactgtatggccgccttggaaggcattaatcaaacttttggctggactaaccgtaagcgatgtccctgcaataatcaaaaggtcagcttgggcaatcaagttccgagccgcttcggaggtttctcggttgggcatttcaccaaaatag

SEQ ID NO: 2896 - protein, 74 aa, Alloiococcus otitidis
MMTPTESWKVKSTGIRIRLMASRLITTVWPPWKALIKLLAGLTVSDVPAIIKRSAWAIKFRAASEVSRLGISPK

SEQ ID NO: 2897 - DNA, 744 bp, Alloiococcus otitidis
  CDS (166)..(741)
atggaagataagataggaacttttgccgactatgtaagatcagcccagtccatagccttttttggtggggcaggtgtgtctactgaaagtggcctgcctgactaccggtctcataatggcgtctatactgctatggagaacaagggtaaggaccctaagaaggttatgcacatcaactacctgctcaaccatcccaaggaattcttcaaacggcggaaagatgacagggatatcaaacccaatcccgcccacaaggccttggcgaccttagaaaaaatggggaaagaagtccacatcatcacccaaaatgtcgacagtctccaccaaaaagctggttcttccagcgtttatgaactgcatggatccaaccgtacctggttttgtatggattgtggccaggaggtcaaagaaacggatgtagtctttgaagatgacctgcccacctgtcaaaattgctcgggtctaatgcggcctagtgtcacctattttggtgaaatgcccaaccgagaaacctccgaagcggctcggaacttgattgcccaagctgaccttttgattattgcagggacatcgcttacggttagtccagccaaaagtttgattaatgccttccaaggcggccatacagtggttatcaaccgggaggccattaaacgaattcggattccggttgacttgactttccaggattcagttggagtcatcatgcaagagttgatcgatcgaatacaagagggggaataa

SEQ ID NO: 2898 - protein, 192 aa, Alloiococcus otitidis
MHINYLLNHPKEFFKRRKDDRDIKPNPAHKALATLEKMGKEVHIITQNVDSLHQKAGSSSVYELHGSNRTWFCMDCGQEVKETDVVFEDDLPTCQNCSGLMRPSVTYFGEMPNRETSEAARNLIAQADLLIIAGTSLTVSPAKSLINAFQGGHTVVINREAIKRIRIPVDLTFQDSVGVIMQELIDRIQEGE

SEQ ID NO: 2899 - DNA, 744 bp, Alloiococcus otitidis; identical to SEQ ID NO: 2897
  CDS (1)..(741)

SEQ ID NO: 2900 - protein, 247 aa, Alloiococcus otitidis
MEDKIGTFADYVRSAQSIAFFGGAGVSTESGLPDYRSHNGVYTAMENKGKDPKKVMHINYLLNHPKEFFKRRKDDRDIKPNPAHKALATLEKMGKEVHIITQNVDSLHQKAGSSSVYELHGSNRTWFCMDCGQEVKETDVVFEDDLPTCQNCSGLMRPSVTYFGEMPNRETSEAARNLIAQADLLIIAGTSLTVSPAKSLINAFQGGHTVVINREAIKRIRIPVDLTFQDSVGVIMQELIDRIQEGE

SEQ ID NO: 2901 - DNA, 1455 bp, Alloiococcus otitidis
  CDS (73)..(1452)
cttgactttccaggattcagttggagtcatcatgcaagagttgatcgatcgaatacaagagggggaataacaatgggggaattacgagagagaattaaggctagaacagaggaaaacaaggacaagctattggactatttaaaattggagtcggtttcggcccaaagaagggagattgatgaaacagcggcctatgtcaaaaacttgctggaagaatttggggcagaagcagaagttttaagcctggccgacaagcccttagcccaccccgtcgtctatggttttattccagcaaaagaagccaacaagccgaccttactcatttacaaccactatgatgtccagccggaagacccggttgaggagtggcgaactagaccctttgaaccagttgaaaaagacggggccatctattgccggggtgtgtctgataacaaggccaacttgattgcccggctcaatgccatccagctcttcttagaagaccatgatggcctgccgatcaatattaagttcctcattgaaggggaagaagagatcggtagtgtccacattgatgattatttagcccaataccaggacaagtttgctgcagatgcctgcatctgggagtcagggagcaaagacggccaaggacggctccacatgtctgccgggatgaaggggattgcttactttgatttggccaaccaaacagctgatattgatgtccactcttcacaagctgctatcgtggacaatgctgcttggcgtctaacccaggccttggcgagtatgaaagatgccaagaaccgaattactattgacggtttttacgacttaatggaagaacctagcccagaagctcgggcttacttggaccaagttccatttgaccctgattcactaaaagagggcttaaacctacggacaccctttatcacaaatgaccttgactacagtgaaaaagaagccctctacttctacccaaccttgaccatcagtggcttggatgcaggctaccaaggggagggggctaaaaccatcttgcctaagtcggctcgggccaaactggatgtccggctagtgccaggctacacacctgaaaatgttcaaaatctcttgcgagaccacttagactcgcatggctatgctgattttaacttggacttgattgcagctgttaaacctttccggacagacctgaccgatccttttattgacttgatggtccaaactggtgaggccgtttacggggaaggcaaggccattatcacccctaactcacccggaactggtccaatgcagtcttttggtcactatctcggtgtgccgattgtgggcatcgggtcagaatacagaggatcaggtgcccatgctccaaacgaacacattcgttgggaagacttctatgataatatcgcccacattcttggcataattgaaaattttgaccaagtaaattggacaaactag

SEQ ID NO: 2902 - protein, 460 aa, Alloiococcus otitidis
MGELRERIKARTEENKDKLLDYLKLESVSAQRREIDETAAYVKNLLEEFGAEAEVLSLADKPLAHPVVYGFIPAKEANKPTLLIYNHYDVQPEDPVEEWRTRPFEPVEKDGAIYCRGVSDNKANLIARLNAIQLFLEDHDGLPINIKFLIEGEEEIGSVHIDDYLAQYQDKFAADACIWESGSKDGQGRLHMSAGMKGIAYFDLANQTADIDVHSSQAAIVDNAAWRLTQALASMKDAKNRITIDGFYDLMEEPSPEARAYLDQVPFDPDSLKEGLNLRTPFITNDLDYSEKEALYFYPTLTISGLDAGYQGEGAKTILPKSARAKLDVRLVPGYTPENVQNLLRDHLDSHGYADFNLDLIAAVKPFRTDLTDPFIDLMVQTGEAVYGEGKAIITPNSPGTGPMQSFGHYLGVPIVGIGSEYRGSGAHAPNEHIRWEDFYDNIAHILGIIENFDQVNWTN

SEQ ID NO: 2903 - DNA, 255 bp, Alloiococcus otitidis
  CDS (22)..(252)
tccttagaaagtaggcagaccatgtctaagaagaataaagcagttgaagttgacattattgaaaccgaccgccacaaggaagaccaggtagacttggaagtcaaggtgaagaaaaaaaccataggccagattcaaaaaccacctggccaaagccaggtgaccgccttgatgtcttccggcaaaaaacgccaagtcaaatcagtcgacgaagccatccaagctattatcgctgagtataacttgcatgacctataa

SEQ ID NO: 2904 - protein, 77 aa, Alloiococcus otitidis
MSKKNKAVEVDIIETDRHKEDQVDLEVKVKKKTIGQIQKPPGQSQVTALMSSGKKRQVKSVDEAIQAIIAEYNLHDL

SEQ ID NO: 2905 - DNA, 1062 bp, Alloiococcus otitidis
  CDS (406)..(1059)
cctataaagggggaagttatggaaaaactggaaaaatatgaagataaaatcccacataaaaaggaattaatccaagccattgaaattggcatgcgacacatggaccggattatgctaccccagagtgcggctgagatgacttatttcatactcttatctattattcctattatcttagtcatcgctaacattatcccgatgctaccgattgccacagaccaggtcttgtctattgtccaagaagttattccggctgatgtctataatgttttagagccaaccctgatgggctatttagaagggggaagcgggggagctatttccattggtttaattaccgccctcttctctgctagtcggattgtgtcgattttgaaccggtccttagatgagatatatggaacggtggacaagcggaactttgtcttagagcggattgtttcttttttaattatgctagggattatagccctagccggtttagccctctttgtctttatttttggtgaagctattttgggctttgtccaagacttgctcggtttagattttacctttatgaacatctttatgatctttcgctgggtaattgtcctagtcttattccccttgatctttttgattatttaccatgtcctacccagccaccacctggaactcaaatactcccttccaggggccatctttgcggctgttgcttctatcatcctttccgaattttataccttgattttacgtcttttcggtggggatgcggtggggaatgctacttttggtgcagtgatcgtcctcatgcttttcctctatattgccaatatgattaccttcatcggagccatgatcaatacctttatctttgaatgggtcaacgaggagtccgttgaggcttacgaacacgacatgcaccggaaggaacagttggaaaacaccaagtggaagggttaccctgacaaccagaagacccaaatcttaagacacaaactctataaaacggattatctgaagtccttaaacagtgaaagtgacgacaaggttgaaatgaataaattgtcggatgaatag

SEQ ID NO: 2906 - protein, 218 aa, Alloiococcus otitidis
MDKRNFVLERIVSFLIMLGIIALAGLALFVFIFGEAILGFVQDLLGLDFTFMNIFMIFRWVIVLVLFPLIFLIIYHVLPSHHLELKYSLPGAIFAAVASIILSEFYTLILRLFGGDAVGNATFGAVIVLMLFLYIANMITFIGAMINTFIFEWVNEESVEAYEHDMHRKEQLENTKWKGYPDNQKTQILRHKLYKTDYLKSLNSESDDKVEMNKLSDE

SEQ ID NO: 2907 - DNA, 1062 bp, Alloiococcus otitidis; identical to SEQ ID NO: 2905
  CDS (19)..(1059)

SEQ ID NO: 2908 - protein, 347 aa, Alloiococcus otitidis
MEKLEKYEDKIPHKKELIQAIEIGMRHMDRIMLPQSAAEMTYFILLSIIPIILVIANIIPMLPIATDQVLSIVQEVIPADVYNVLEPTLMGYLEGGSGGAISIGLITALFSASRIVSILNRSLDEIYGTVDKRNFVLERIVSFLIMLGIIALAGLALFVFIFGEAILGFVQDLLGLDFTFMNIFMIFRWVIVLVLFPLIFLIIYHVLPSHHLELKYSLPGAIFAAVASIILSEFYTLILRLFGGDAVGNATFGAVIVLMLFLYIANMITFIGAMINTFIFEWVNEESVEAYEHDMHRKEQLENTKWKGYPDNQKTQILRHKLYKTDYLKSLNSESDDKVEMNKLSDE

SEQ ID NO: 2909 - DNA, 390 bp, Alloiococcus otitidis
  CDS (259)..(387)
ataaattgtcggatgaataggaaggttgataaggtgttaaaagtatactgccaccccaaatgtacgacttgtaaaaaagctgaagcctggcttcaagaccaaggccttgaatacgactgggttgatattcgccaagaacaaccagaccgagacctggtcttacaggcactaaaagagtcaggtcgaagccggaagagtttttttaataccagtggtaaggcctaccgtgaccaaggcgttaaggatcaattggagggcatgacggatgaagaagcagttgacctcttgttatctgacggcatgctcatcaaacgtccctttgtaaccgatggccaaaacgtaacatctggttttaaggaagaccaatttagggaagtatggaaaggatag

SEQ ID NO: 2910 - protein, 43 aa, Alloiococcus otitidis
MTDEEAVDLLLSDGMLIKRPFVTDGQNVTSGFKEDQFREVWKG

SEQ ID NO: 2911 - DNA, 390 bp, Alloiococcus otitidis; identical to SEQ ID NO: 2909
  CDS (13)..(387)

SEQ ID NO: 2912 - protein, 125 aa, Alloiococcus otitidis
MNRKVDKVLKVYCHPKCTTCKKAEAWLQDQGLEYDWVDIRQEQPDRDLVLQALKESGRSRKSFFNTSGKAYRDQGVKDQLEGMTDEEAVDLLLSDGMLIKRPFVTDGQNVTSGFKEDQFREVWKG

SEQ ID NO: 2913 - DNA, 417 bp, Alloiococcus otitidis
  CDS (55)..(414)
catctggttttaaggaagaccaatttagggaagtatggaaaggatagggtagatatgataatcaaataccatgcaaatggcttgtatgtaaaaaaagatggggacctctaccaaatcggactctccgacaagggccaggacgatgtgggcgatgtgatgttttgtgacctagccaagcaagagggacacttgagtaaaggggataccattatgggggtggaaggggctaaggctgttactgattttacagcccccgtcgacggtcagatcgtagcggccaaccaggccattgaagaccaacctgacctacttaactccagtagccaggaagagaattggattctcaaattagaagaagttaaagaagaagactttaaccaactaagtgaccaggcttggcctgaggaagatgactag

SEQ ID NO: 2914 - protein, 120 aa, Alloiococcus otitidis
MIIKYHANGLYVKKDGDLYQIGLSDKGQDDVGDVMFCDLAKQEGHLSKGDTIMGVEGAKAVTDFTAPVDGQIVAANQAIEDQPDLLNSSSQEENWILKLEEVKEEDFNQLSDQAWPEEDD

SEQ ID NO: 2915 - DNA, 744 bp, Alloiococcus otitidis
  CDS (16)..(741)
aaggaattgttgtgtatgacgcctattatcggaatttcgggtaataccaaaactccaattgagaataaaggattaaatattgaaatcgcctatactccattaggctttgtggagagtgtccaagacactggtgccctcccctttatcattcccgtcaacgatccccaaacagctaaagactatatcaaccgtatcgacgcccttatcttaactggcggtcaagatgtcaacccgcttagcttcggccaagaacccagtgttcacctggcttctaccaatattaagcgggacgactttgagattgccttggtccaagaagcaatccagcaacacaaacccatactaggggtctgccgaggaatgcaaatctacaatgttgctttaggggggagcctctaccaggatttggaagaatatgaggacttaagcatccaacatgtccagcggtctgttacctttaagtacactcacaccgttgacctagaaaaagacacctggctcagccaaatcttaggctctgagattgtagtcaactcctaccaccaccaggctatcaaggaagtcgcccaaggtctccgtccaactgcttgggccaaagacggtattattgaggcaatggagcatacagatcctaacttggaccactaccttatccaatggcacccagagtggatgtataaggtagacgataattcccaaaagatatttaatgccttcattgaccttgtcaaaagcaagggatag

SEQ ID NO: 2916 - protein, 242 aa, Alloiococcus otitidis
MTPIIGISGNTKTPIENKGLNIEIAYTPLGFVESVQDTGALPFIIPVNDPQTAKDYINRIDALILTGGQDVNPLSFGQEPSVHLASTNIKRDDFEIALVQEAIQQHKPILGVCRGMQIYNVALGGSLYQDLEEYEDLSIQHVQRSVTFKYTHTVDLEKDTWLSQILGSEIVVNSYHHQAIKEVAQGLRPTAWAKDGIIEAMEHTDPNLDHYLIQWHPEWMYKVDDNSQKIFNAFIDLVKSKG

SEQ ID NO: 2917 - DNA, 744 bp, Alloiococcus otitidis; identical to SEQ ID NO: 2915
  CDS (7)..(741)

SEQ ID NO: 2918 - protein, 245 aa, Alloiococcus otitidis
MLCMTPIIGISGNTKTPIENKGLNIEIAYTPLGFVESVQDTGALPFIIPVNDPQTAKDYINRIDALILTGGQDVNPLSFGQEPSVHLASTNIKRDDFEIALVQEAIQQHKPILGVCRGMQIYNVALGGSLYQDLEEYEDLSIQHVQRSVTFKYTHTVDLEKDTWLSQILGSEIVVNSYHHQAIKEVAQGLRPTAWAKDGIIEAMEHTDPNLDHYLIQWHPEWMYKVDDNSQKIFNAFIDLVKSKG

SEQ ID NO: 2919 - DNA, 789 bp, Alloiococcus otitidis
  CDS (16)..(786)
aaaggaaggtcagatatgtctgtattagaaatcaaaaatcttcacgtccgtgtcgaagaaaaagaaatcctaaagggagttaatatgaccatcaacactggtgaaatccatgcggttatgggcccaaacggaacaggtaagtccaccttggcagctgccatcatgggccacccagcttatgaggtcactgaaggggaagtgttaattgacggcgagaacatcttggaattggaaacagatgaaagggccttggctggtctcttcttagcagtccaatacccaagtgaaattgctgggattaccaatgctgagttcctccgggcatcgatcaatgctcgtcgggatgaagatgacaagatcagtgtcatggactttattaaaaaaatggatgagaagatggaactgctagacatgcccaaagaaatggcagaacgttacttaaatgaaggcttctctggtggggagaaaaaacgaaatgaaatccttcaattattaatgattgaaccaacctttgccatcctagatgaaattgactctggtttagacatagatgctttgaaagtcgtagccaaaggggttaaccaaatgcgcggtgatgattttggatcgttgatcattacccactaccaacgcttgctagaatacattgaacctgatgttgttcacattatgatggatggccgggtggtcaagacaggcgatgcccaattggctgctcaattagaggctgaaggttacaagggactcgttgaagaacttggcttagacattgacttagaagaagaataa

SEQ ID NO: 2920 - protein, 257 aa, Alloiococcus otitidis
MSVLEIKNLHVRVEEKEILKGVNMTINTGEIHAVMGPNGTGKSTLAAAIMGHPAYEVTEGEVLIDGENILELETDERALAGLFLAVQYPSEIAGITNAEFLRASINARRDEDDKISVMDFIKKMDEKMELLDMPKEMAERYLNEGFSGGEKKRNEILQLLMIEPTFAILDEIDSGLDIDALKVVAKGVNQMRGDDFGSLIITHYQRLLEYIEPDVVHIMMDGRVVKTGDAQLAAQLEAEGYKGLVEELGLDIDLEEE

SEQ ID NO: 2921 - DNA, 1314 bp, Alloiococcus otitidis
  CDS (16)..(1311)
gaggaggctataaaaatggcagacaaggttgaatcatatgtaagtcatgctgatgctgtacaagcctactccaaaaaactacaagagccagattggatgctacaactaagattagaagctctagacaagatagatgacttacaggaaccgagaattgaacgcttgcgctacaaccgctggccattgtggcaattgcctaatttagaagcaggcgacaaagcaagtgacattgactacactaaatatgtaccaaaactccatacagacaatattgttatccaagctggtaaccagtctgtagtagaagagttgccccaatccttgaaagataaaggggtggtttttactgatattaaaactgccttaagagattacccagacttggttaaagaagcctatatgacaactgctctacaacccgacaagaacaagattaccgcctttcacgctgcctttatgaactcaggcttgtttttgtatgttcctaaaaatgtagtcattgaagacccactcgaggccatctttatccaagatgccttagtccaagacagctatattaagcacgtcctggtttatgccggtcctaactcgcaatttgattatgtggaacgctggttgaccgctggggacgagaaaacatcggccaatattattgttgaagtcattgcccaggcgaatgctaaaattcgcttctcctcagttgacttactcggccaaaacaccaccgcctacttcaaccggattggtcatgtgggccgggatgccaatatcgactgggcgatcggagcaatgaataatggtaatgtcattgtcgacttagataccgacctagttggcgacgggtctgaaacagatctcaaggcggtcggtatcagttggggcaaacagacccaagtcattgattccaatgtggtcaactttggcagcaactccaacggtaacattttccagcatggggtcatcttagaccgaggaaccttgacctttaatggggttggtcagatccaccgcaatgctaaagacgctaatgcccagcaagaatcccgagtcctcatgctgtcagaaaaagctcgtggggatgccaaccccatccttttaattgatgaatttgaagttgaggctggccacgctgcttctattggacgggtagacccaaatgagttatactacctaatgagtcggggtatccctaaagcagaagccgagcgattggttatccgaggtttcttaggagcagtgatttcagctatcccgtctaaggttgtacgcgaagaattgattgatacaatcgaaaggaagttactttcacgatga

SEQ ID NO: 2922 - protein, 432 aa, Alloiococcus otitidis
MADKVESYVSHADAVQAYSKKLQEPDWMLQLRLEALDKIDDLQEPRIERLRYNRWPLWQLPNLEAGDKASDIDYTKYVPKLHTDNIVIQAGNQSVVEELPQSLKDKGVVFTDIKTALRDYPDLVKEAYMTTALQPDKNKITAFHAAFMNSGLFLYVPKNVVIEDPLEAIFIQDALVQDSYIKHVLVYAGPNSQFDYVERWLTAGDEKTSANIIVEVIAQANAKIRFSSVDLLGQNTTAYFNRIGHVGRDANIDWAIGAMNNGNVIVDLDTDLVGDGSETDLKAVGISWGKQTQVIDSNVVNFGSNSNGNIFQHGVILDRGTLTFNGVGQIHRNAKDANAQQESRVLMLSEKARGDANPILLIDEFEVEAGHAASIGRVDPNELYYLMSRGIPKAEAERLVIRGFLGAVISAIPSKVVREELIDTIERKLLSR

SEQ ID NO: 2923 - DNA, 1266 bp, Alloiococcus otitidis
  CDS (28)..(1263)
tacaatcgaaaggaagttactttcacgatgagcctagaccaggaaaagttgcgccgggactttcctattctcaaccaagaagttaacgatgaacctttagtttatttagacaatgccgcttcgacccaaaaacctaagcaggttattgacaagattcagacctattatgaagagtcgaacgccaatgtctaccggggagttcatgccctgtcagagcgggccacccgcttgtatgaagaagcccggcacaaattggctgactttattggagccagccaggcagaagaagtgattttcacccgagggaccactactggactgaactgggtcgctcaaaatttaggtcaattggttttggaagaaggggacgaaatcttaatatcctacatggaacaccactccaatatcatcccctggcagcaaatcgcaaagatcacaggagcccaattgcggtatattgatctgaccccagacggccagttggacctagacgatgccaagaataaaatcagtccaaatacaaagattttagccatcacccatgtctctaatgtccttggggtgattaatccaatcaaggaactaggccagctcatccaccagcagggagggaccttggtggtagacggagcccaggcagtccctcacatggccattgacgtccaagacttggatgctgatttttatgcttttagtgggcataaaatgtgcgggcctacaggaattggtgtattatatggtaaaagaaaatggttggaagccattgagcctgctgaattcggtggggaaatgatccaagttgttgacttatacgacagcacttgggctgacttgccccataaatttgaggctgggacccccaatattgctggcgcaattggcctggcagcagctgtcgattacttgcaagacttaggcatggaccaaatcttccaacatgagcatgacctagccagttacacccttggccgtttgcaagctaaagatggggtgaccgttttcgggccaagtgaccctgataaacggtcgggggtcattgccttcaatatcgatggcctccacccgcatgatgtggccaccgccttggatctagaaggtgtggctatccgagctggtcaccactgtgcccaaccactgatgaagtatatcaaacaacctgcaacagctcgtgccagtttttacctctataataccaaggctgatgcagataaattgctagaagcaatcgataagacgaaggagtttttttcaaatgggcttgactag

SEQ ID NO: 2924 - protein, 412 aa, Alloiococcus otitidis
MSLDQEKLRRDFPILNQEVNDEPLVYLDNAASTQKPKQVIDKIQTYYEESNANVYRGVHALSERATRLYEEARHKLADFIGASQAEEVIFTRGTTTGLNWVAQNLGQLVLEEGDEILISYMEHHSNIIPWQQIAKITGAQLRYIDLTPDGQLDLDDAKNKISPNTKILAITHVSNVLGVINPIKELGQLIHQQGGTLVVDGAQAVPHMAIDVQDLDADFYAFSGHKMCGPTGIGVLYGKRKWLEAIEPAEFGGEMIQVVDLYDSTWADLPHKFEAGTPNIAGAIGLAAAVDYLQDLGMDQIFQHEHDLASYTLGRLQAKDGVTVFGPSDPDKRSGVIAFNIDGLHPHDVATALDLEGVAIRAGHHCAQPLMKYIKQPATARASFYLYNTKADADKLLEAIDKTKEFFSNGLD

SEQ ID NO: 2925 - DNA, 513 bp, Alloiococcus otitidis
  CDS (121)..(510)
aagcaatcgataagacgaaggagtttttttcaaatgggcttgactaggttagatcaattataccgtgccgttatcctagaccactctaaagacccccgtcataaaggacaactcgaccgggtggatgccgtcatggccttgcgcaatccgacctgtggcgatgaaatacaagtccaggtcaagttagatgaccagggccaggttatccaagatgtatcctttgatggccagggctgtaccatttctatggccagtgccagtatgatgacagaagcgatcatgggcaagagcctagaccaggtaaaagacctttaccaaaccttctccgacctggtccagggtaaagaacctgaacaaactgaagacttgggagatgccgtcatgctagaaggagtccgccagtttccaagccgggtacggtgtgctaccttgtcatggaaagctctcaataaggccttagagaatactgggtctggccttgacgaaaatacatcagaagacatatacgattaa

SEQ ID NO: 2926 - protein, 130 aa, Alloiococcus otitidis
MDAVMALRNPTCGDEIQVQVKLDDQGQVIQDVSFDGQGCTISMASASMMTEAIMGKSLDQVKDLYQTFSDLVQGKEPEQTEDLGDAVMLEGVRQFPSRVRCATLSWKALNKALENTGSGLDENTSEDIYD

SEQ ID NO: 2927 - DNA, 513 bp, Alloiococcus otitidis; identical to SEQ ID NO: 2925
  CDS (34)..(510)

SEQ ID NO: 2928 - protein, 159 aa, Alloiococcus otitidis
MGLTRLDQLYRAVILDHSKDPRHKGQLDRVDAVMALRNPTCGDEIQVQVKLDDQGQVIQDVSFDGQGCTISMASASMMTEAIMGKSLDQVKDLYQTFSDLVQGKEPEQTEDLGDAVMLEGVRQFPSRVRCATLSWKALNKALENTGSGLDENTSEDIYD

SEQ ID NO: 2929 - DNA, 1488 bp, Alloiococcus otitidis
  CDS (94)..(1485)
agaatactgggtctggccttgacgaaaatacatcagaagacatatacgattaagtcagattggattgaaaccgggaaagggagaatgaataaaatggtaaaagatgtaccaactagagattaccaatttggttttcatgatgacgttgaaagtatttacgacaccggtaaagggttaaacgaagatattattagagaaatctctgcccgcaaaaatgaaccagaatggatgctagactaccggctaaaagcctacaagcactataaagaccgcccagtacccacatggggggcagatttatcgggagtagactttgacaactatacttactaccggaaagccagcgaaaaacccgaacgcgattgggatgacgtccctgaaaaaattaaagaaacctttgaccgcttgggtgtgcctgaagccgaacgtcaatacttagcagggtcaggtgcccaatatgagtcagaagttgtctatcacaacatgaaagaagagttcgaaaaacaagggattgtctttatggataccgactctgccttgcaagagtatcctgaactcttcaaagaacacttcgggacagtggtacccccaactgacaacaagctcgctgccttaaactcatccgtttggtctggtggaacctttatctacgttcctaaaggggtcaagtgtgacgtcccccttcaaatgtacttccggattaacgaagaaatgatgggccaattcgaacgaaccttgattattgtggatgaaggagccagtgtccactacgtagaaggctgtaccgctccaaccttctcagcttcctccctccacgcagcagtggttgaaatcatcgtcaaaaaagatgcctactgccgctataccaccattcaaaactggtctgacaatgtatacaacttagtcactaaacgagcccatgctgcagaaggggctacagttgagtgggttgacggcaaccttggagctaaaacaaccatgaaatacccaagcatccacctcaatggtgaaggggcaagaggaacgaccatgtctatcgctatggctggtgccaaccaagtccaagatactggggctaaaatgatccacaatgcacccaacacctctagctccattgtatctaagtccatctcaaaagatggtggagaggtcaactaccgcggccaggttgtctttgggaaaaattcgtcaggttctatttcccacattgaatgtgacaccattattatggatgaattgtccaagtcagacacgattccattcaatgaaatccacaacaacaatgtcgccttggaacacgaggccaaggtctcaaaaatttcagaagagcagctttactacctaatgagccgtggactggacgaagagacagcaactgaaatgattgtcatgggatttgttgagccgttctctaaagaattgccaatggaatatgcggtcgaattgaaccgtctaatctcatacgagatggaagggtcagtgggttag

SEQ ID NO: 2930 - protein, 464 aa, Alloiococcus otitidis
MVKDVPTRDYQFGFHDDVESIYDTGKGLNEDIIREISARKNEPEWMLDYRLKAYKHYKDRPVPTWGADLSGVDFDNYTYYRKASEKPERDWDDVPEKIKETFDRLGVPEAERQYLAGSGAQYESEVVYHNMKEEFEKQGIVFMDTDSALQEYPELFKEHFGTVVPPTDNKLAALNSSVWSGGTFIYVPKGVKCDVPLQMYFRINEEMMGQFERTLIIVDEGASVHYVEGCTAPTFSASSLHAAVVEIIVKKDAYCRYTTIQNWSDNVYNLVTKRAHAAEGATVEWVDGNLGAKTTMKYPSIHLNGEGARGTTMSIAMAGANQVQDTGAKMIHNAPNTSSSIVSKSISKDGGEVNYRGQVVFGKNSSGSISHIECDTIIMDELSKSDTIPFNEIHNNNVALEHEAKVSKISEEQLYYLMSRGLDEETATEMIVMGFVEPFSKELPMEYAVELNRLISYEMEGSVG

SEQ ID NO: 2931 - DNA, 1488 bp, Alloiococcus otitidis; identical to SEQ ID NO: 2929
  CDS (85)..(1485)

SEQ ID NO: 2932 - protein, 467 aa, Alloiococcus otitidis
MNKMVKDVPTRDYQFGFHDDVESIYDTGKGLNEDIIREISARKNEPEWMLDYRLKAYKHYKDRPVPTWGADLSGVDFDNYTYYRKASEKPERDWDDVPEKIKETFDRLGVPEAERQYLAGSGAQYESEVVYHNMKEEFEKQGIVFMDTDSALQEYPELFKEHFGTVVPPTDNKLAALNSSVWSGGTFIYVPKGVKCDVPLQMYFRINEEMMGQFERTLIIVDEGASVHYVEGCTAPTFSASSLHAAVVEIIVKKDAYCRYTTIQNWSDNVYNLVTKRAHAAEGATVEWVDGNLGAKTTMKYPSIHLNGEGARGTTMSIAMAGANQVQDTGAKMIHNAPNTSSSIVSKSISKDGGEVNYRGQVVFGKNSSGSISHIECDTIIMDELSKSDTIPFNEIHNNNVALEHEAKVSKISEEQLYYLMSRGLDEETATEMIVMGFVEPFSKELPMEYAVELNRLISYEMEGSVG

SEQ ID NO: 2933 - DNA, 1488 bp, Alloiococcus otitidis; identical to SEQ ID NO: 2929
  CDS (19)..(1485)

SEQ ID NO: 2934 - protein, 489 aa, Alloiococcus otitidis
MTKIHQKTYTIKSDWIETGKGRMNKMVKDVPTRDYQFGFHDDVESIYDTGKGLNEDIIREISARKNEPEWMLDYRLKAYKHYKDRPVPTWGADLSGVDFDNYTYYRKASEKPERDWDDVPEKIKETFDRLGVPEAERQYLAGSGAQYESEVVYHNMKEEFEKQGIVFMDTDSALQEYPELFKEHFGTVVPPTDNKLAALNSSVWSGGTFIYVPKGVKCDVPLQMYFRINEEMMGQFERTLIIVDEGASVHYVEGCTAPTFSASSLHAAVVEIIVKKDAYCRYTTIQNWSDNVYNLVTKRAHAAEGATVEWVDGNLGAKTTMKYPSIHLNGEGARGTTMSIAMAGANQVQDTGAKMIHNAPNTSSSIVSKSISKDGGEVNYRGQVVFGKNSSGSISHIECDTIIMDELSKSDTIPFNEIHNNNVALEHEAKVSKISEEQLYYLMSRGLDEETATEMIVMGFVEPFSKELPMEYAVELNRLISYEMEGSVG

SEQ ID NO: 2935 - DNA, 405 bp, Alloiococcus otitidis
  CDS (13)..(402)
ggaggttttagtatgaagaaaagttttatctcaaaagttgttgttggttcttccttgctaggagcattcggtttaggcattgttgcggaagccgggcaaacttacactaattatagcactactgttggaagactaaatggaagtggctatacaagctatcagactaaatctgtttccggtcagaaagccgatgtatatttagcaaataacggtgggtacaaagtggatgttcggactaattcacgagatggttctagtggtgaatggtcccgaggattaacggctggaagtagaagacaattgactaatgggcataataaaggaagtaaagttcgtcttcattttagcaataatattaccacgcgagttaatacacaggcacaaggcaattggcgttccaattaa

SEQ ID NO: 2936 - protein, 130 aa, Alloiococcus otitidis
MKKSFISKVVVGSSLLGAFGLGIVAEAGQTYTNYSTTVGRLNGSGYTSYQTKSVSGQKADVYLANNGGYKVDVRTNSRDGSSGEWSRGLTAGSRRQLTNGHNKGSKVRLHFSNNITTRVNTQAQGNWRSN

SEQ ID NO: 2937 - DNA, 813 bp, Alloiococcus otitidis
  CDS (526)..(810)
gtgattttaatgaagaaaataataaaagaagatctaaaccaagctatttttactagactcggactgatggttctagctcttgtccttatacccatactttataatttaatccggatcaatgatttcaatttagtgagtccactccaatattttgaatttaatatttccctatttctgccttttctctttcccttatttgcgattttgatttttgcccaacctttttctcatgaattttccaaccattacctcctctatactcggacaagaatagacttgaaagattatataaatgggaagttaatcagtaatgctagcttggtctttttgggatttttcctggttgtgatagccttgtttgtgttttcagtctatattgaaccccagctaggtctaataaactataggcctgaactggtggtcgattcagtagaagagctgacaagatttgatcaagggcttttcactttttcccaacttattgctagcagtccctggctctttgcttttgtgtatgctagctgggtggctttgaatgctgtagcttattctagtttggctattctctgcctattattgattccaaatatttttatcgccctctccattcccttcttgttctaccatatcgcatcatttattattgccctgctcggttttccagaatttttatttgatgcaagtatctttcccttcaatgttgatcagcaaagtataacgaccgtttttctaccttttacagtggtccttattctcaatatcctgacctactttctattcctgaaaagagattgggaagggaagctagtatag

SEQ ID NO: 2938 - protein, 95 aa, Alloiococcus otitidis
MALNAVAYSSLAILCLLLIPNIFIALSIPFLFYHIASFIIALLGFPEFLFDASIFPFNVDQQSITTVFLPFTVVLILNILTYFLFLKRDWEGKLV

SEQ ID NO: 2939 - DNA, 813 bp, Alloiococcus otitidis; identical to SEQ ID NO: 2937
  CDS (277)..(810)

SEQ ID NO: 2940 - protein, 178 aa, Alloiococcus otitidis
MKDYINGKLISNASLVFLGFFLVVIALFVFSVYIEPQLGLINYRPELVVDSVEELTRFDQGLFTFSQLIASSPWLFAFVYASWVALNAVAYSSLAILCLLLIPNIFIALSIPFLFYHIASFIIALLGFPEFLFDASIFPFNVDQQSITTVFLPFTVVLILNILTYFLFLKRDWEGKLV

SEQ ID NO: 2941 - DNA, 813 bp, Alloiococcus otitidis; identical to SEQ ID NO: 2937
  CDS (133)..(810)

SEQ ID NO: 2942 - protein, 226 aa, Alloiococcus otitidis
MSPLQYFEFNISLFLPFLFPLFAILIFAQPFSHEFSNHYLLYTRTRIDLKDYINGKLISNASLVFLGFFLVVIALFVFSVYIEPQLGLINYRPELVVDSVEELTRFDQGLFTFSQLIASSPWLFAFVYASWVALNAVAYSSLAILCLLLIPNIFIALSIPFLFYHIASFIIALLGFPEFLFDASIFPFNVDQQSITTVFLPFTVVLILNILTYFLFLKRDWEGKLV

SEQ ID NO: 2943 - DNA, 813 bp, Alloiococcus otitidis; identical to SEQ ID NO: 2937
  CDS (10)..(810)

SEQ ID NO: 2944 - protein, 267 aa, Alloiococcus otitidis
MKKIIKEDLNQAIFTRLGLMVLALVLIPILYNLIRINDFNLVSPLQYFEFNISLFLPFLFPLFAILIFAQPFSHEFSNHYLLYTRTRIDLKDYINGKLISNASLVFLGFFLVVIALFVFSVYIEPQLGLINYRPELVVDSVEELTRFDQGLFTFSQLIASSPWLFAFVYASWVALNAVAYSSLAILCLLLIPNIFIALSIPFLFYHIASFIIALLGFPEFLFDASIFPFNVDQQSITTVFLPFTVVLILNILTYFLFLKRDWEGKLV

SEQ ID NO: 2945 - DNA, 813 bp, Alloiococcus otitidis; identical to SEQ ID NO: 2937
  CDS (1)..(810)

SEQ ID NO: 2946 - protein, 270 aa, Alloiococcus otitidis
MILMKKIIKEDLNQAIFTRLGLMVLALVLIPILYNLIRINDFNLVSPLQYFEFNISLFLPFLFPLFAILIFAQPFSHEFSNHYLLYTRTRIDLKDYINGKLISNASLVFLGFFLVVIALFVFSVYIEPQLGLINYRPELVVDSVEELTRFDQGLFTFSQLIASSPWLFAFVYASWVALNAVAYSSLAILCLLLIPNIFIALSIPFLFYHIASFIIALLGFPEFLFDASIFPFNVDQQSITTVFLPFTVVLILNILTYFLFLKRDWEGKLV

SEQ ID NO: 2947 - DNA, 1641 bp, Alloiococcus otitidis
  CDS (760)..(1638)
tcagcaaagtataacgaccgtttttctaccttttacagtggtccttattctcaatatcctgacctactttctattcctgaaaagagattgggaagggaagctagtatagacatgaaagaatttataaagaagcaggtaaaattagtcttgtccttggcccttgtcctagttttttacatctattccttatctatccaccaagacctactaggccgggcaggatcagtgtccaatttgaatttttgggatatggctctgtcattactgagtgacccttatttgtttatctattttacccttcccatttttctctttatttgtgtttaccaggtagagacgaactttgactatggtttgattatccgttttaaaagctatactgcctggatcttttacaccttgcatgaattggcaggctatatttttacctattttgccttaatggggcttacccttgccttagttttagtgactggcccttattcgctcagtttggcttggagtccctttagccaggccagtgtgaataatggtttgaatctggatatccttccttccttaatgttaaccggtttgagtcccttgttaactggcctaatccagctggcctatagcttggtatttttcctccttttggccttgatgctcactataatttatctgtttagccagagaaaggtctaccttatcggggctagcatcttcatttttatctacgcggcaacttctttccaattcttgcctgaagaattatcctttttgtcattagcctcttatgccaagttctaccatggctttatggcatttaaatcaatctttactcccttcattctgatgggtgggttggcattagtcctattacttggccaggctttttttcgtcaatcttccattttagtagaccagttaaaaagtgctctgccttacctgatatatacagtcttagtcttcttaggcttgtcttctaccttacttgaatatgatggtatgggtcagactgtgggggattttatttttttaaaattttacggtgtcgctagcacaggcttttccctcttgtctctgctttattatcttattgtatttttaggttttacctatttctttcaagtatacttgaatgactttatcagccaacaattaagctactacctgatccgctacaaaagttacagggcttggtttcattccctaatgattggcttgagtttggtcatcttagtctttcttttaggacttgctttactagctagcttacttggtctggtcaagggctatcaattttcctaccaagttaagatggatacggtcaatctgtcagcccttgaattagtggtccacttccttttgaatggttccctgcaattactgaattatggcctgctgctcttggtcgtaacctggctggtccaggatgctatctacggcctattaggcttaggtatttttatggttttaatgttgccgagtatcaatatgggccaggtcttaccgatgggtcttaacagctttggtttattagacaaggtgagcttgcttggcctgactttccgtctggtcctctaccttattcttgagtacggcttgatccgactcttattaaagcaattcaattctggattagtgaggttaaaaagatga

SEQ ID NO: 2948 - protein, 293 aa, Alloiococcus otitidis
MSLASYAKFYHGFMAFKSIFTPFILMGGLALVLLLGQAFFRQSSILVDQLKSALPYLIYTVLVFLGLSSTLLEYDGMGQTVGDFIFLKFYGVASTGFSLLSLLYYLIVFLGFTYFFQVYLNDFISQQLSYYLIRYKSYRAWFHSLMIGLSLVILVFLLGLALLASLLGLVKGYQFSYQVKMDTVNLSALELVVHFLLNGSLQLLNYGLLLLVVTWLVQDAIYGLLGLGIFMVLMLPSINMGQVLPMGLNSFGLLDKVSLLGLTFRLVLYLILEYGLIRLLLKQFNSGLVRLKR

SEQ ID NO: 2949 - DNA, 1641 bp, Alloiococcus otitidis; identical to SEQ ID NO: 2947
  CDS (400)..(1638)

SEQ ID NO: 2950 - protein, 413 aa, Alloiococcus otitidis
MHELAGYIFTYFALMGLTLALVLVTGPYSLSLAWSPFSQASVNNGLNLDILPSLMLTGLSPLLTGLIQLAYSLVFFLLLALMLTIIYLFSQRKVYLIGASIFIFIYAATSFQFLPEELSFLSLASYAKFYHGFMAFKSIFTPFILMGGLALVLLLGQAFFRQSSILVDQLKSALPYLIYTVLVFLGLSSTLLEYDGMGQTVGDFIFLKFYGVASTGFSLLSLLYYLIVFLGFTYFFQVYLNDFISQQLSYYLIRYKSYRAWFHSLMIGLSLVILVFLLGLALLASLLGLVKGYQFSYQVKMDTVNLSALELVVHFLLNGSLQLLNYGLLLLVVTWLVQDAIYGLLGLGIFMVLMLPSINMGQVLPMGLNSFGLLDKVSLLGLTFRLVLYLILEYGLIRLLLKQFNSGLVRLKR

SEQ ID NO: 2951 - DNA, 1641 bp, Alloiococcus otitidis; identical to SEQ ID NO: 2947
  CDS (112)..(1638)

SEQ ID NO: 2952 - protein, 509 aa, Alloiococcus otitidis
MKEFIKKQVKLVLSLALVLVFYIYSLSIHQDLLGRAGSVSNLNFWDMALSLLSDPYLFIYFTLPIFLFICVYQVETNFDYGLIIRFKSYTAWIFYTLHELAGYIFTYFALMGLTLALVLVTGPYSLSLAWSPFSQASVNNGLNLDILPSLMLTGLSPLLTGLIQLAYSLVFFLLLALMLTIIYLFSQRKVYLIGASIFIFIYAATSFQFLPEELSFLSLASYAKFYHGFMAFKSIFTPFILMGGLALVLLLGQAFFRQSSILVDQLKSALPYLIYTVLVFLGLSSTLLEYDGMGQTVGDFIFLKFYGVASTGFSLLSLLYYLIVFLGFTYFFQVYLNDFISQQLSYYLIRYKSYRAWFHSLMIGLSLVILVFLLGLALLASLLGLVKGYQFSYQVKMDTVNLSALELVVHFLLNGSLQLLNYGLLLLVVTWLVQDAIYGLLGLGIFMVLMLPSINMGQVLPMGLNSFGLLDKVSLLGLTFRLVLYLILEYGLIRLLLKQFNSGLVRLKR

SEQ ID NO: 2953 - DNA, 1641 bp, Alloiococcus otitidis; identical to SEQ ID NO: 2947
  CDS (88)..(1638)

SEQ ID NO: 2954 - protein, 517 aa, Alloiococcus otitidis
MGREASIDMKEFIKKQVKLVLSLALVLVFYIYSLSIHQDLLGRAGSVSNLNFWDMALSLLSDPYLFIYFTLPIFLFICVYQVETNFDYGLIIRFKSYTAWIFYTLHELAGYIFTYFALMGLTLALVLVTGPYSLSLAWSPFSQASVNNGLNLDILPSLMLTGLSPLLTGLIQLAYSLVFFLLLALMLTIIYLFSQRKVYLIGASIFIFIYAATSFQFLPEELSFLSLASYAKFYHGFMAFKSIFTPFILMGGLALVLLLGQAFFRQSSILVDQLKSALPYLIYTVLVFLGLSSTLLEYDGMGQTVGDFIFLKFYGVASTGFSLLSLLYYLIVFLGFTYFFQVYLNDFISQQLSYYLIRYKSYRAWFHSLMIGLSLVILVFLLGLALLASLLGLVKGYQFSYQVKMDTVNLSALELVVHFLLNGSLQLLNYGLLLLVVTWLVQDAIYGLLGLGIFMVLMLPSINMGQVLPMGLNSFGLLDKVSLLGLTFRLVLYLILEYGLIRLLLKQFNSGLVRLKR

SEQ ID NO: 2955 - DNA, 699 bp, Alloiococcus otitidis
  CDS (217)..(696)
gtacggcttgatccgactcttattaaagcaattcaattctggattagtgaggttaaaaagatgagtattatagaattatccaatgtcagcaagagtttaaatggtattcccttgtttgtcaatgtcaatttaaaggttgaaaaaggcgaaatatacggaatacggggacacaatgggtctgggaagtctgttctgtttaaaatcatgtgtgggtttatgaagccagactcgggtctggtcaaaattgaccaccactataagaatgaaaaagatgactttcctgaaaagttcggtgtcttgattgaccaagctggctacaaggctaaccagactggctttgacaacttaaaatccctggccgctattaatgacctgatttctgaccaggacatccgccaggccatggagagggttggcttgaacccagatatcaagcaaaaaatgcgcaactattccttagggatgaagcagaaggtggggatagtccaggccttcatggaggggcaagaagtcttgcttttggatgagccctttaacgccttggatgtcgctagtgtcaaccaggttagggacttaatccttggtttcaaaaaggaagggaagacagttgttctcaccagccacaaccaggaagacttagaccttttgtgcgaccagcaatatttaatcaaccaagaaagcttggaaagaataaaatag

SEQ ID NO: 2956 - protein, 160 aa, Alloiococcus otitidis
MKPDSGLVKIDHHYKNEKDDFPEKFGVLIDQAGYKANQTGFDNLKSLAAINDLISDQDIRQAMERVGLNPDIKQKMRNYSLGMKQKVGIVQAFMEGQEVLLLDEPFNALDVASVNQVRDLILGFKKEGKTVVLTSHNQEDLDLLCDQQYLINQESLERIK

SEQ ID NO: 2957 - DNA, 699 bp, Alloiococcus otitidis; identical to SEQ ID NO: 2955
  CDS (61)..(696)

SEQ ID NO: 2958 - protein, 212 aa, Alloiococcus otitidis
MSIIELSNVSKSLNGIPLFVNVNLKVEKGEIYGIRGHNGSGKSVLFKIMCGFMKPDSGLVKIDHHYKNEKDDFPEKFGVLIDQAGYKANQTGFDNLKSLAAINDLISDQDIRQAMERVGLNPDIKQKMRNYSLGMKQKVGIVQAFMEGQEVLLLDEPFNALDVASVNQVRDLILGFKKEGKTVVLTSHNQEDLDLLCDQQYLINQESLERIK

SEQ ID NO: 2959 - DNA, 987 bp, Alloiococcus otitidis
  CDS (442)..(984)
caatacgacaaccaactattaagtgaagcaaatgctcttggcttgaaagacttcttagatgaagatgatgaacttgttacggttgaaagcaatgaagaattagacgaccacttgagtgatgtcgaagtaattattagttcgcccttcctgcccctttatgttaccaaagaacggattgaaaaggcaccaaagcttaaactatccattactgctggagttgggtcagaccacgtggacttaaaagcagctgatgaacacgatgttgcagtggtagaagtgaccgggtctaaccgggtttcaaccgctgaacatgcagtcttgaacattattgtcttagtccggaacttccaagaagggaaccgccaagcccgtgaaggggagtgggacttgtctaaattagggaaccgggcccaagacttggaaggcaagaaagttggtattatgggatacggtctcattggtcagatggtggctgaaagactagctccatttggtgtcgaaattcaacactatgacccagccaaggatgaagacagtgagtattccaaagcagtttcctttgatgagctgatcgaaagctccgacattatctctatccacactccgttgacaaagtcaacagaaggcttgtttgacaaggaagtcttccagaagatgaaagattctgcccacttagtcaatgtgtcacggggagccatcgttaatactgaagacttgaaagaagccttagaaaatgatgtcatagcaggttatggtggagatgtttggtacccacaaccagcaccaagtgaccacccttggagaagtctacctgaaacaagaaactccatgaccccacactatggtggaatgaccattgatgctcaaaaacgtatccaggatggggtccatgaattattgaccaattacaaaaatggagaagaatttgaccctaaacatgtcatcgtcggacctgagggattaagtgactcctacactgtcgaataa

SEQ ID NO: 2960 - protein, 181 aa, Alloiococcus otitidis
MGYGLIGQMVAERLAPFGVEIQHYDPAKDEDSEYSKAVSFDELIESSDIISIHTPLTKSTEGLFDKEVFQKMKDSAHLVNVSRGAIVNTEDLKEALENDVIAGYGGDVWYPQPAPSDHPWRSLPETRNSMTPHYGGMTIDAQKRIQDGVHELLTNYKNGEEFDPKHVIVGPEGLSDSYTVE

SEQ ID NO: 2961 - DNA, 987 bp, Alloiococcus otitidis; identical to SEQ ID NO: 2959
  CDS (232)..(984)

SEQ ID NO: 2962 - protein, 251 aa, Alloiococcus otitidis
MDLKAADEHDVAVVEVTGSNRVSTAEHAVLNIIVLVRNFQEGNRQAREGEWDLSKLGNRAQDLEGKKVGIMGYGLIGQMVAERLAPFGVEIQHYDPAKDEDSEYSKAVSFDELIESSDIISIHTPLTKSTEGLFDKEVFQKMKDSAHLVNVSRGAIVNTEDLKEALENDVIAGYGGDVWYPQPAPSDHPWRSLPETRNSMTPHYGGMTIDAQKRIQDGVHELLTNYKNGEEFDPKHVIVGPEGLSDSYTVE

SEQ ID NO: 2963 - DNA, 987 bp, Alloiococcus otitidis; identical to SEQ ID NO: 2959
  CDS (43)..(984)

SEQ ID NO: 2964 - protein, 314 aa, Alloiococcus otitidis
MKDFLDEDDELVTVESNEELDDHLSDVEVIISSPFLPLYVTKERIEKAPKLKLSITAGVGSDHVDLKAADEHDVAVVEVTGSNRVSTAEHAVLNIIVLVRNFQEGNRQAREGEWDLSKLGNRAQDLEGKKVGIMGYGLIGQMVAERLAPFGVEIQHYDPAKDEDSEYSKAVSFDELIESSDIISIHTPLTKSTEGLFDKEVFQKMKDSAHLVNVSRGAIVNTEDLKEALENDVIAGYGGDVWYPQPAPSDHPWRSLPETRNSMTPHYGGMTIDAQKRIQDGVHELLTNYKNGEEFDPKHVIVGPEGLSDSYTVE

SEQ ID NO: 2965 - DNA, 327 bp, Alloiococcus otitidis
  CDS (70)..(324)
attcttgctaagcttttgaaggtattagaaggtagaacacttaatttttctagactatggaagctgataatgaaagtgattttgtttcatataataattctattaacaggttttatagtgtataatataataaacgcatatatagtgggaggaaggaccatgttgcctaataccgcagatcataccctctttgtctttttattctcttttttagaccttctatttaaactatttgccgtctatgccctatacaaaatcattcgaatcgattctcgtttaaaagatctacttgaattgcttaaaggtaagaaaacaaaaaaagaatag

SEQ ID NO: 2966 - protein, 85 aa, Alloiococcus otitidis
MKVILFHIIILLTGFIVYNIINAYIVGGRTMLPNTADHTLFVFLFSFLDLLFKLFAVYALYKIIRIDSRLKDLLELLKGKKTKKE

SEQ ID NO: 2967 - DNA, 327 bp, Alloiococcus otitidis; identical to SEQ ID NO: 2965
  CDS (16)..(324)

SEQ ID NO: 2968 - protein, 103 aa, Alloiococcus otitidis
MKVLEGRTLNFSRLWKLIMKVILFHIIILLTGFIVYNIINAYIVGGRTMLPNTADHTLFVFLFSFLDLLFKLFAVYALYKIIRIDSRLKDLLELLKGKKTKKE

SEQ ID NO: 2969 - DNA, 1425 bp, Alloiococcus otitidis
  CDS (58)..(1422)
aaatgggaggattctatgacagtagaaacagtcggcgttagttttttgattctgggggtgtttttacttatcggaaaggctatccgctacaaggtgtcttggatcagtaacctcttcctaccaagttccattgtgggtggcttccttgccttgatcgtcggcccgggagtactcggacctgtgttaaaccaattcgttagcccggactcattctttgctaacggcctgatcccggattcgatcctagaagtttggtccgccttaccaagtatgtttattacgattatatttgcttctatctttttgggtgattcagtcccaagtattcggaaaatttggaagatagccagtcctcaaatcttaatgggacatgcagtctcctggggtcagtatgtaattggtatgctgttgactgttcttgttttaactccttttttcgggatgaaccccttggcaggggctttaatcgagattaccttcgtcgggggtcacgggacagcagctggtttgtccaataccttctatgacttgggctttccagaaggggcagatttgtcactagggctagctaccattggtgtcttgaccggggtaatcgttgggatattcttgattaattacatgcagcgtaagggacaagctaagtatgtcgacgcggaggcaaccgaccaacgacgcgagcaaataggggagtcccatggtttggatactgagccagaggtcattgaagccaaagccattgaacccctggccttccactttgctttgatagccgcggccattatcgggggttacctcatcctccaggccttgatctttttggaaaccctgataaggggagaggatgctgatatgattttcttctcactggttccttctttccctattgctatgattgccggtatgttgatccagatgattgccaacaaacttggctttgccaactatattgaccgaagtattattaataagatttccggttttgccttggacattttattggtatcctctttagccaccttgtctctcgacgttattggtaataacttgattccatttgttttactatcacttgtggctattatcttcaatatcattgctgtcatgttcctcgctccccggctcatccctgactactggttcgagcgagccatgggggactttggccaagccactgggatggcagcaacgggtatcttattaatgaaggtagcagacccccaagggcaaacgccagccatggaaggtttttcctacaagcagattttgtttgagcccttctgtggtggtggactggtcacctcagcttccatgccattgatcttagcctttggacctgtcgcattcttagtcatatcgattgttatgtttgccatattcttaatccttggctttgccaactttaaacgtttgaagcaggcttaa

SEQ ID NO: 2970 - protein, 455 aa, Alloiococcus otitidis
MFLLIGKAIRYKVSWISNLFLPSSIVGGFLALIVGPGVLGPVLNQFVSPDSFFANGLIPDSILEVWSALPSMFITIIFASIFLGDSVPSIRKIWKIASPQILMGHAVSWGQYVIGMLLTVLVLTPFFGMNPLAGALIEITFVGGHGTAAGLSNTFYDLGFPEGADLSLGLATIGVLTGVIVGIFLINYMQRKGQAKYVDAEATDQRREQIGESHGLDTEPEVIEAKAIEPLAFHFALIAAAIIGGYLILQALIFLETLIRGEDADMIFFSLVPSFPIAMIAGMLIQMIANKLGFANYIDRSIINKISGFALDILLVSSLATLSLDVIGNNLIPFVLLSLVAIIFNIIAVMFLAPRLIPDYWFERAMGDFGQATGMAATGILLMKVADPQGQTPAMEGFSYKQILFEPFCGGGLVTSASMPLILAFGPVAFLVISIVMFAIFLILGFANFKRLKQA

SEQ ID NO: 2971 - DNA, 1425 bp, Alloiococcus otitidis; identical to SEQ ID NO: 2969
  CDS (16)..(1422)

SEQ ID NO: 2972 - protein, 469 aa, Alloiococcus otitidis
MTVETVGVSFLILGVFLLIGKAIRYKVSWISNLFLPSSIVGGFLALIVGPGVLGPVLNQFVSPDSFFANGLIPDSILEVWSALPSMFITIIFASIFLGDSVPSIRKIWKIASPQILMGHAVSWGQYVIGMLLTVLVLTPFFGMNPLAGALIEITFVGGHGTAAGLSNTFYDLGFPEGADLSLGLATIGVLTGVIVGIFLINYMQRKGQAKYVDAEATDQRREQIGESHGLDTEPEVIEAKAIEPLAFHFALIAAAIIGGYLILQALIFLETLIRGEDADMIFFSLVPSFPIAMIAGMLIQMIANKLGFANYIDRSIINKISGFALDILLVSSLATLSLDVIGNNLIPFVLLSLVAIIFNIIAVMFLAPRLIPDYWFERAMGDFGQATGMAATGILLMKVADPQGQTPAMEGFSYKQILFEPFCGGGLVTSASMPLILAFGPVAFLVISIVMFAIFLILGFANFKRLKQA

SEQ ID NO: 2973 - DNA, 654 bp, Alloiococcus otitidis
  CDS (55)..(651)
aaagaaatttctagaatacacttttttatagttaattttgaaaggaagatactgatgaaaaacagaaagttactaacaaggcttgtatctattttaatgttaatactgataatatcaattaattcacctgtgaatgctgaagtattaaagcctgctgaaggagggacgccagctttagaagaggaaaatcaatacgatggtattgcagttagaacagctcaaggtaaaaatttaaagattcctggagggaaaggtactctcacctcaaatgcatggcgctcgactagagagagttctgttggaaatacctatcagtgggattatcaagtttcagctgtttacagtggaaacaaaaaagtagaaagtattaaaacttcttggtacggaaaagcttcgctaagaaattcagcttctataaatctcggacttagtaattcaggcgcaactgttggagcaagttcaagttggaaaaatacgactactccagtgaaatattgggaaaatactaatggttcaaaaagttcggattataggagtaatttaatagtaagtccaagtaaagattatcgttcaaatacaataagtttaatgaataccgctagagtgaaactaaaaggcgatcccaaaccctatgttgtttcatctggggtataa

SEQ ID NO: 2974 - protein, 199 aa, Alloiococcus otitidis
MKNRKLLTRLVSILMLILIISINSPVNAEVLKPAEGGTPALEEENQYDGIAVRTAQGKNLKIPGGKGTLTSNAWRSTRESSVGNTYQWDYQVSAVYSGNKKVESIKTSWYGKASLRNSASINLGLSNSGATVGASSSWKNTTTPVKYWENTNGSKSSDYRSNLIVSPSKDYRSNTISLMNTARVKLKGDPKPYVVSSGV

SEQ ID NO: 2975 - DNA, 870 bp, Alloiococcus otitidis
  CDS (16)..(867)
aagagagtgactaagatgaaaaaaattggctatattatctgtttcatggtctttattctggcaggatgcagcaaaactatcggaaaaaatgaagaagtcttctataatccctatattcagaacttgatcacctataatggccaatcaaaagaagtagaactgtgggatccagccgacaaccaattgcagtaccctactggggaagcggatgtatatgttgatggaaattcgcaaacaaacgaatttattttaatgaaaatagataaatcggaaataactgagctttatgattttcctaaaaatgaaggggttttcccaattggtgaaaaagatgggactatttactttgtccattccttctaccaagaagatgggaaagaatatctcgataaaagaactctgtcagctctagacctaaatacgaaagaagtaaccgattataccaatgcagaggggctaatcgactacggtgtagtgggcgatgaagcgatttattatactgtttacgatgatgaccaagacttgtattccttaatgaagataaactacagtgatacgagccaaagtccagagactataaaaacaggattgcaggacggcatagtcctactagacggccaagaattgtattattcagatggtaaaaaactgatttctgacaaccatgaatttaaaaaagaatcggtcaactttttttaccaagggtcactctttcaattttatttaaatgaagaaggtagcttgagtcttaaaatgacaaacccgaaagatgacagtgtttacagtgaagaagatattgaaggcattcgtttggaagatgaccaggttaaaatctgcaagccagggcaagtgatcaaccatgacttataa

SEQ ID NO: 2976 - protein, 284 aa, Alloiococcus otitidis
MKKIGYIICFMVFILAGCSKTIGKNEEVFYNPYIQNLITYNGQSKEVELWDPADNQLQYPTGEADVYVDGNSQTNEFILMKIDKSEITELYDFPKNEGVFPIGEKDGTIYFVHSFYQEDGKEYLDKRTLSALDLNTKEVTDYTNAEGLIDYGVVGDEAIYYTVYDDDQDLYSLMKINYSDTSQSPETIKTGLQDGIVLLDGQELYYSDGKKLISDNHEFKKESVNFFYQGSLFQFYLNEEGSLSLKMTNPKDDSVYSEEDIEGIRLEDDQVKICKPGQVINHDL

SEQ ID NO: 2977 - DNA, 870 bp, Alloiococcus otitidis; identical to SEQ ID NO: 2975
  CDS (7)..(867)

SEQ ID NO: 2978 - protein, 287 aa, Alloiococcus otitidis
MTKMKKIGYIICFMVFILAGCSKTIGKNEEVFYNPYIQNLITYNGQSKEVELWDPADNQLQYPTGEADVYVDGNSQTNEFILMKIDKSEITELYDFPKNEGVFPIGEKDGTIYFVHSFYQEDGKEYLDKRTLSALDLNTKEVTDYTNAEGLIDYGVVGDEAIYYTVYDDDQDLYSLMKINYSDTSQSPETIKTGLQDGIVLLDGQELYYSDGKKLISDNHEFKKESVNFFYQGSLFQFYLNEEGSLSLKMTNPKDDSVYSEEDIEGIRLEDDQVKICKPGQVINHDL

SEQ ID NO: 2979 - DNA, 621 bp, Alloiococcus otitidis
  CDS (7)..(618)
tcaaccatgacttataaagtaacactaaaaaatttaacaaagaagttcggttctcgcgtgattttaagggatttaaacctcaaatttgacaaagaccatatttacctgattacaggcaaaaatggttgtggcaagtcaaccttgctcaacatattatccaaatatgatacagattatgaaggagactatgagtcgaatgggcttaggattgcctatttattgcaagatgatttgttatttagaaatttaaccgttgaggacaacttgaacctgcaaattatggcagaaggaaaagagcctgatcctaccatgattaagattctagcaggcaagttgggtttgttagaccttcttgaccgtaatgtttcacaattatcgggaggagaaaagaaaaaagttgcgatagggcaattaatattaaaagaggctgacctggttctattggacgagccgactgccaatattcaaaaagaatacgcccaggatctaatcgattttatctatgaagaatttaaaggaaaaattctggtcatcgcttcccatgataaattaaaggaacccagggatagagaaatgataaaaataaaattggaagatgggatggcctattatggaatataa

SEQ ID NO: 2980 - protein, 204 aa, Alloiococcus otitidis
MTYKVTLKNLTKKFGSRVILRDLNLKFDKDHIYLITGKNGCGKSTLLNILSKYDTDYEGDYESNGLRIAYLLQDDLLFRNLTVEDNLNLQIMAEGKEPDPTMIKILAGKLGLLDLLDRNVSQLSGGEKKKVAIGQLILKEADLVLLDEPTANIQKEYAQDLIDFIYEEFKGKILVIASHDKLKEPRDREMIKIKLEDGMAYYGI

SEQ ID NO: 2981 - DNA, 1167 bp, Alloiococcus otitidis
  CDS (25)..(1164)
aattggaagatgggatggcctattatggaatataaaatatcaaagatgatagccaataagaaaaaatatatattccatattatcatggccatctttatcctgatttctgtcaccatttccattgtagcttcctttgctttgtaccagtatgataccgccaagcaaaactttgttgataatcaatttgccaaaactattgaaatatcctcttacaatgaagcaggcaaccaggttagaaaattaaatgacaatgatattgacaagctagaagaacttctggattcaagctatgagagttatgaaattaccgctgaacaccttattccctttggggttcagacagctagtggggacgtggtttttgttaagtctttttcgggtgacttcttcctgaatgatttagtgacagacaatcatttaatgaccaagaaaaaggataacaattcgactttgactcttagcctccccgtcataaagactgagaatggaggctatagctccgaccaatcgattaaccgggaatacgacttagaccctatcgaagaaagttctttattaagcaattacatcaaagaagacgagcttattgcgtctgaagcaacttttaaagaaatactggatacgatgtttccagaggaagaatatgtcgatattgaaaaattgtatattactgttaattctgttgaagatgtcaggaatgtagcagctagattatcaagtaatgactataatgtaagccatgcttttgaatactatgatgatttagagaccagtataagcagattaatcactttaagtgtgctagtattagctatcttactcatctttacgatttgtttcttgaccggattatttgaactaatgttgaagaattccgtgggggatatcgccatcttgaaacatcttgggtactcaaaaagaaggatcggcaagatttacctctatccaatggtcgtcagaagtattattgcctttgttattattggtataattaataccattttatacctatttgacattataaatactttccaaagtttgatcattttccagcttgtgatcagcttggtgtgtgtcattgcattgggaattatgttcatgagaattagaaactatgcaagtaaaaatatcctttcactagttaaaatctacaaggtagaagagtga

SEQ ID NO: 2982 - protein, 380 aa, Alloiococcus otitidis
MEYKISKMIANKKKYIFHIIMAIFILISVTISIVASFALYQYDTAKQNFVDNQFAKTIEISSYNEAGNQVRKLNDNDIDKLEELLDSSYESYEITAEHLIPFGVQTASGDVVFVKSFSGDFFLNDLVTDNHLMTKKKDNNSTLTLSLPVIKTENGGYSSDQSINREYDLDPIEESSLLSNYIKEDELIASEATFKEILDTMFPEEEYVDIEKLYITVNSVEDVRNVAARLSSNDYNVSHAFEYYDDLETSISRLITLSVLVLAILLIFTICFLTGLFELMLKNSVGDIAILKHLGYSKRRIGKIYLYPMVVRSIIAFVIIGIINTILYLFDIINTFQSLIIFQLVISLVCVIALGIMFMRIRNYASKNILSLVKIYKVEE

SEQ ID NO: 2983 - DNA, 1167 bp, Alloiococcus otitidis; identical to SEQ ID NO: 2981
  CDS (10)..(1164)

SEQ ID NO: 2984 - protein, 385 aa, Alloiococcus otitidis
MGWPIMEYKISKMIANKKKYIFHIIMAIFILISVTISIVASFALYQYDTAKQNFVDNQFAKTIEISSYNEAGNQVRKLNDNDIDKLEELLDSSYESYEITAEHLIPFGVQTASGDVVFVKSFSGDFFLNDLVTDNHLMTKKKDNNSTLTLSLPVIKTENGGYSSDQSINREYDLDPIEESSLLSNYIKEDELIASEATFKEILDTMFPEEEYVDIEKLYITVNSVEDVRNVAARLSSNDYNVSHAFEYYDDLETSISRLITLSVLVLAILLIFTICFLTGLFELMLKNSVGDIAILKHLGYSKRRIGKIYLYPMVVRSIIAFVIIGIINTILYLFDIINTFQSLIIFQLVISLVCVIALGIMFMRIRNYASKNILSLVKIYKVEE

SEQ ID NO: 2985 - DNA, 540 bp, Alloiococcus otitidis
  CDS (4)..(537)
cttatgtataatgcaaatggtgacaacccccagcagggctttcaatggggaccctttttactggggatcttgtacttagttttagggattttagcctttaacaaccctgtcatttcgattgtttctattgcctatgtctttgctattggagctattattattggtttatttcaaatatttgcccgccgccggattaaacagttttcgacttacgattcaactgccctagtggttctaggcgtcatcgatattattatcggggttattttctttattaatattgcaaccgccatctttgccatccactttctttttgccttttggttgatcattgattcaattggtgctttggtttcagctggcccaattaaagactattccaaggctcaatattggttaactattgtggtcgctattattggtcttgtcattgggattgttttgatttttaacccggcaacttctttcttaaccattgccttgttgatcggtattttctttaccctgtttggcatcttgaatattgtctatgccttttaa

SEQ ID NO: 2986 - protein, 178 aa, Alloiococcus otitidis
MYNANGDNPQQGFQWGPFLLGILYLVLGILAFNNPVISIVSIAYVFAIGAIIIGLFQIFARRRIKQFSTYDSTALVVLGVIDIIIGVIFFINIATAIFAIHFLFAFWLIIDSIGALVSAGPIKDYSKAQYWLTIVVAIIGLVIGIVLIFNPATSFLTIALLIGIFFTLFGILNIVYAF

SEQ ID NO: 2987 - DNA, 285 bp, Alloiococcus otitidis
  CDS (10)..(282)
tactcatccatgacttcccttaagcttgcttcttcttcaagttctaggcttttacttaggtctgcttggtcctggccatcgacttggaccctaatttggatggggacttcctggcttatttctggttctgaattggcctcttccagttctgggtcttcttcaggattgttggcatttccgcaagccactaaggtcagactaaggattaaaaagaaaggaagttggctcttctttccgaatttcataactgcctcctcttggaaaaaagttgcttttgggctttaa

SEQ ID NO: 2988 - protein, 91 aa, Alloiococcus otitidis
MTSLKLASSSSSRLLLRSAWSWPSTWTLIWMGTSWLISGSELASSSSGSSSGLLAFPQATKVRLRIKKKGSWLFFPNFITASSWKKVAFGL

SEQ ID NO: 2989 - DNA, 450 bp, Alloiococcus otitidis
  CDS (94)..(447)
agcccaaaagcaacttttttccaagaggaggcagttatgaaattcggaaagaagagccaacttcctttctttttaatccttagtctgaccttagtggcttgcggaaatgccaacaatcctgaagaagacccagaactggaagaggccaattcagaaccagaaataagccaggaagtccccatccaaattagggtccaagtcgatggccaggaccaagcagacctaagtaaaagcctagaacttgaagaagaagcaagcttaagggaagtcatggatgagtactaccagattaaagaagaaaatggctaccttgttgaattagaaggaattgaacatgatcctagtaaggacaagtactggctattttatgtgaacgatgaactagctgagttcaccatggatgagtatatgcttgacgcaaacgatcagattgattggcgattagaataa

SEQ ID NO: 2990 - protein, 118 aa, Alloiococcus otitidis
MACGNANNPEEDPELEEANSEPEISQEVPIQIRVQVDGQDQADLSKSLELEEEASLREVMDEYYQIKEENGYLVELEGIEHDPSKDKYWLFYVNDELAEFTMDEYMLDANDQIDWRLE

SEQ ID NO: 2991 - DNA, 450 bp, Alloiococcus otitidis; identical to SEQ ID NO: 2989
  CDS (37)..(447)

SEQ ID NO: 2992 - protein, 137 aa, Alloiococcus otitidis
MKFGKKSQLPFFLILSLTLVACGNANNPEEDPELEEANSEPEISQEVPIQIRVQVDGQDQADLSKSLELEEEASLREVMDEYYQIKEENGYLVELEGIEHDPSKDKYWLFYVNDELAEFTMDEYMLDANDQIDWRLE

SEQ ID NO: 2993 - DNA, 537 bp, Alloiococcus otitidis
  CDS (22)..(534)
attgtaaaggaggacacaattatggcaaaagttgctaccctaattaccgacttatttgaagactctgaatttttctcacccaagcatgccttagaagaagctggtcaccaagttgtggcaatcggtgaccaagctggacgtgaaattaagggtaagacagatgaaaaaacttacccactggatgaaggcattgatgatgtcaatccagctgattatgatgccctcttaattcctggaggctattctccagataaattacgaggagaccaacgtttcaccgactttgcccgtcattttgctgaccagcaaaaacctatctttaccatttgccacggacctcaactcttggttaacgctgacgtcttaaaaggcaaagatgccaccgctgttaagcaagttggcgttgatgtcagcaatgctggcggtaactttattgaccaagaagttgttattgatgattctggcttaatcactagccggactccagatgaccttcctgccttcaatagaagtattgttcaagctttagaacaataa

SEQ ID NO: 2994 - protein, 171 aa, Alloiococcus otitidis
MAKVATLITDLFEDSEFFSPKHALEEAGHQVVAIGDQAGREIKGKTDEKTYPLDEGIDDVNPADYDALLIPGGYSPDKLRGDQRFTDFARHFADQQKPIFTICHGPQLLVNADVLKGKDATAVKQVGVDVSNAGGNFIDQEVVIDDSGLITSRTPDDLPAFNRSIVQALEQ

SEQ ID NO: 2995 - DNA, 1686 bp, Alloiococcus otitidis
  CDS (601)..(1683)
atggaagtgcaagacatgttgttccagtttctgggtggactagggatctttcttttcggcctgcaatttatgggcgatgggctcaaacaatctgccggtgataatttaagaagtatcctaaacaagtttacctctacccccatccgagctgttttagccggagtagcagtcaccgttttaattcaaagttcttcagggaccaccgttttagccattggattagttagtgccggctttatgagtttacagcaagccattggaattatcatgggtgccaacattgggacgaccattaccgcctttatcatcggtttggatattggcgagttagccttaccgattatcgcagtcggcgctttcctcatctttttcttcaaaaaagaccggattaactacataggtgagactgtctttggctttggggccctcttttacggattggaattaatgagttctggtcttgagcccctacagtctatgcccttctttaacaatctcatgctgagcttttcatccaaccccctcctaggtgtcttggctgggacagtggttaccatgttgatgcaatcatcttcagcaaccactgggatcgtccagagtatgtatgctcaagggagcatggaactgtctgctgccctacccctcgtttttggaaccaatatcgggacgaccatcaccgcagtcctagctgccatcggggccagtttgtcagctaaaagagcttccgctgcccacgttatctttaacgttattgccactatctttgtcatgctagtcttcaacccctacttagccctaatcgaatacctagctgaacaattcagcttgagtccagaaatgcaaattgcctttgcccacgggatttttaacctagttgcagttctcatcctgatctggttcatcccacaaattgccaagttggtcagtaaaatagtgccaggatcagatgatgacctgcctaaatacgaatcttacatggaccggtccttgatcaagtcctcccctatcatagcttttggccaggtcaaaaaagaaattggtcagattgggaagtttgctgccaaagaatttgaatatacttacaagtactaccattcaaaaaaagatgaccaccacgataaggtcatgcagattgaagacattgtggaccacattgacgggaaaatcaccgaattcttaatgcttttgtcagtcaaagacatgcccgaccagtattctcaagattacaacaagatgactgaagtcaccaagtatattgaacggattggggaccactcccaaagcattgcccagattatccatgacatctaccctaaatacaaggacaaaaataaaaaacctgaagatattttatataatgaaaaagtggaaaaactcttcaccatggtgagcgacaatatcgaacaagccttacaatcttaccaagacaatgatgaagctggagccaaccaagtccttgagcgggaagctgctattgatattctggaagatgaattacggaatgaatacctaaaccagctcaataaaggcgaaggcaagccgtccgacagtgtcctctttattgacctggtcgctaacttgaagcggatatcagaccacacctcccgcattgccaaacacatcttaggcatccgctatcctttccaaaataaaaataaaggtgaacctaagcttgaagcgaattag

SEQ ID NO: 2996 - protein, 361 aa, Alloiococcus otitidis
MYAQGSMELSAALPLVFGTNIGTTITAVLAAIGASLSAKRASAAHVIFNVIATIFVMLVFNPYLALIEYLAEQFSLSPEMQIAFAHGIFNLVAVLILIWFIPQIAKLVSKIVPGSDDDLPKYESYMDRSLIKSSPIIAFGQVKKEIGQIGKFAAKEFEYTYKYYHSKKDDHHDKVMQIEDIVDHIDGKITEFLMLLSVKDMPDQYSQDYNKMTEVTKYIERIGDHSQSIAQIIHDIYPKYKDKNKKPEDILYNEKVEKLFTMVSDNIEQALQSYQDNDEAGANQVLEREAAIDILEDELRNEYLNQLNKGEGKPSDSVLFIDLVANLKRISDHTSRIAKHILGIRYPFQNKNKGEPKLEAN

SEQ ID NO: 2997 - DNA, 1686 bp, Alloiococcus otitidis; identical to SEQ ID NO: 2995
  CDS (478)..(1683)

SEQ ID NO: 2998 - protein, 402 aa, Alloiococcus otitidis
MPFFNNLMLSFSSNPLLGVLAGTVVTMLMQSSSATTGIVQSMYAQGSMELSAALPLVFGTNIGTTITAVLAAIGASLSAKRASAAHVIFNVIATIFVMLVFNPYLALIEYLAEQFSLSPEMQIAFAHGIFNLVAVLILIWFIPQIAKLVSKIVPGSDDDLPKYESYMDRSLIKSSPIIAFGQVKKEIGQIGKFAAKEFEYTYKYYHSKKDDHHDKVMQIEDIVDHIDGKITEFLMLLSVKDMPDQYSQDYNKMTEVTKYIERIGDHSQSIAQIIHDIYPKYKDKNKKPEDILYNEKVEKLFTMVSDNIEQALQSYQDNDEAGANQVLEREAAIDILEDELRNEYLNQLNKGEGKPSDSVLFIDLVANLKRISDHTSRIAKHILGIRYPFQNKNKGEPKLEAN

SEQ ID NO: 2999 - DNA, 1686 bp, Alloiococcus otitidis; identical to SEQ ID NO: 2995
  CDS (1)..(1683)

SEQ ID NO: 3000 - protein, 561 aa, Alloiococcus otitidis
MEVQDMLFQFLGGLGIFLFGLQFMGDGLKQSAGDNLRSILNKFTSTPIRAVLAGVAVTVLIQSSSGTTVLAIGLVSAGFMSLQQAIGIIMGANIGTTITAFIIGLDIGELALPIIAVGAFLIFFFKKDRINYIGETVFGFGALFYGLELMSSGLEPLQSMPFFNNLMLSFSSNPLLGVLAGTVVTMLMQSSSATTGIVQSMYAQGSMELSAALPLVFGTNIGTTITAVLAAIGASLSAKRASAAHVIFNVIATIFVMLVFNPYLALIEYLAEQFSLSPEMQIAFAHGIFNLVAVLILIWFIPQIAKLVSKIVPGSDDDLPKYESYMDRSLIKSSPIIAFGQVKKEIGQIGKFAAKEFEYTYKYYHSKKDDHHDKVMQIEDIVDHIDGKITEFLMLLSVKDMPDQYSQDYNKMTEVTKYIERIGDHSQSIAQIIHDIYPKYKDKNKKPEDILYNEKVEKLFTMVSDNIEQALQSYQDNDEAGANQVLEREAAIDILEDELRNEYLNQLNKGEGKPSDSVLFIDLVANLKRISDHTSRIAKHILGIRYPFQNKNKGEPKLEAN

SEQ ID NO: 3001 - DNA, 465 bp, Alloiococcus otitidis
  CDS (34)..(462)
gataggagtatagaatttagaggagtcaatgccatgatcatattcctaattgccctaactatcttaatattggcaactttgatcagtattatttacatagaagacttggttgaccgcgactattataagccctttgtctaccaaacagctagcttagacttggaagcctttcatgacttctaccagcaaaagggcaatatctttcagtcttacgccagggaaaaatttgacggtccgggtgtttatgtgatctacaaccacagccaggacaagtattattttggccaaggggaccgggtgattgacagcatttatgaccggctgaccgatgaagctgaccaagaaatttaccaggccatctctaattttgatgacctctatgttaagatgatgctcttgagtcaaacgtcttatgaccaaattgatgatctcttggctgtcaccaagggagagtttacaagatag

SEQ ID NO: 3002 - protein, 143 aa, Alloiococcus otitidis
MIIFLIALTILILATLISIIYIEDLVDRDYYKPFVYQTASLDLEAFHDFYQQKGNIFQSYAREKFDGPGVYVIYNHSQDKYYFGQGDRVIDSIYDRLTDEADQEIYQAISNFDDLYVKMMLLSQTSYDQIDDLLAVTKGEFTR

SEQ ID NO: 3003 - DNA, 1782 bp, Alloiococcus otitidis
  CDS (100)..(1779)
acaaggagatggaacatgtttcaaatattacaaaaattaggctggttttttaaactcaaacgcaagacttacgggatagcggtcctctgtttgatcttagtggcgattgcaacagctattacgcctatgattattgggaatattatcgaccaaatgaccgcagggacattaactgtacagaacttagtcatccagattgctattattttctttctagctattttaatgtatggcttgcgctatgtttggcgggctctggtctttaccaactcgacccacctagaagctatcatgcgtaaccgactctttgaccattttaccaagatggatagtcagtttttccaagactttcggactggagacttgatggcccatgcaaccaatgacttggccgcccttaaatttgtagctggtggcgggatcctaaccctggccgactcctttgcagtcggggtcaccaccttggccagtatggtcttgtttgttgactggcgcttgaccctctttaccatcgttccctttccattccttatgctaattggacggaacttaggggttattatcaaccgccgttaccgcaaggccttggagtccttctcccaaatgaatgaccatgttcaagaaagtattgccggcatgcgggccattaaggcttttggggaagaagatagcgattttgaaaatttttcggaagatattgatgaagttatttctaccaacaaggcggttaacaaggtcgatgccctgtacagcccggcgattgaaatgatcacccagtctgcctttatcctgacccttatatttgggacctattatgtcatttcaggccggattaccattggggaccttgtcgcttacttctcctacctgtccatgatgacctggcccctccttggtctaggtcgcttggccaacacactagagcggggaaatgtctcctatgcccgaatcatcgaactcttgtccattaaatcgagtattaaagaagccgataaaccagttgaccaggccttgggtggggacattgattttgatatcaagtcttttaagtaccaggacagcgacgaccggccagcattgaagaatgttcaattccacttgaaggctggccaaaccctcggcttagttggaaagacaggttctgggaaaagtaccatttttaaactcctcatgcgggactatgaccactacgatggccagatcacctatgatggcattgatatcagggattacgccaccgataccctggcccaagggattggttacgtgtctcaagagcctttcttattttccaaatcgattttagacaatgtccgctttggggcaccggacacccctaaagaaaaggtggactactataccaagttagccaatgtctatgaagatatcctggacaccccccaaggttttcaaacccaggtgggagagaagggtgttgccttatctggtgggcaaaaacaaagaatttccatcgcccgtgccctaacagttgaaccggaatttttatacttggatgactccctgtcagcagtggatgccaatacagaacaccagattttacaaaacttcaagaccttaaggaaaaaccaaaccaatatcatttctgctcaccggatttcgtcagttattcatgctgacttaatcttagtgattgacgatggcgaattgattgacaagggaagccaccaagaactcttggaaagaaatgaatggtaccggtccatgtacgaaaaacaacaattgcaactagaagtagaagaaggaggcggtgaccatgagtga

SEQ ID NO: 3004 - protein, 560 aa, Alloiococcus otitidis
MAIATAITPMIIGNIIDQMTAGTLTVQNLVIQIAIIFFLAILMYGLRYVWRALVFTNSTHLEAIMRNRLFDHFTKMDSQFFQDFRTGDLMAHATNDLAALKFVAGGGILTLADSFAVGVTTLASMVLFVDWRLTLFTIVPFPFLMLIGRNLGVIINRRYRKALESFSQMNDHVQESIAGMRAIKAFGEEDSDFENFSEDIDEVISTNKAVNKVDALYSPAIEMITQSAFILTLIFGTYYVISGRITIGDLVAYFSYLSMMTWPLLGLGRLANTLERGNVSYARIIELLSIKSSIKEADKPVDQALGGDIDFDIKSFKYQDSDDRPALKNVQFHLKAGQTLGLVGKTGSGKSTIFKLLMRDYDHYDGQITYDGIDIRDYATDTLAQGIGYVSQEPFLFSKSILDNVRFGAPDTPKEKVDYYTKLANVYEDILDTPQGFQTQVGEKGVALSGGQKQRISIARALTVEPEFLYLDDSLSAVDANTEHQILQNFKTLRKNQTNIISAHRISSVIHADLILVIDDGELIDKGSHQELLERNEWYRSMYEKQQLQLEVEEGGGDHE

SEQ ID NO: 3005 - DNA, 1782 bp, Alloiococcus otitidis; identical to SEQ ID NO: 3003
  CDS (16)..(1779)

SEQ ID NO: 3006 - protein, 588 aa, Alloiococcus otitidis
MFQILQKLGWFFKLKRKTYGIAVLCLILVAIATAITPMIIGNIIDQMTAGTLTVQNLVIQIAIIFFLAILMYGLRYVWRALVFTNSTHLEAIMRNRLFDHFTKMDSQFFQDFRTGDLMAHATNDLAALKFVAGGGILTLADSFAVGVTTLASMVLFVDWRLTLFTIVPFPFLMLIGRNLGVIINRRYRKALESFSQMNDHVQESIAGMRAIKAFGEEDSDFENFSEDIDEVISTNKAVNKVDALYSPAIEMITQSAFILTLIFGTYYVISGRITIGDLVAYFSYLSMMTWPLLGLGRLANTLERGNVSYARIIELLSIKSSIKEADKPVDQALGGDIDFDIKSFKYQDSDDRPALKNVQFHLKAGQTLGLVGKTGSGKSTIFKLLMRDYDHYDGQITYDGIDIRDYATDTLAQGIGYVSQEPFLFSKSILDNVRFGAPDTPKEKVDYYTKLANVYEDILDTPQGFQTQVGEKGVALSGGQKQRISIARALTVEPEFLYLDDSLSAVDANTEHQILQNFKTLRKNQTNIISAHRISSVIHADLILVIDDGELIDKGSHQELLERNEWYRSMYEKQQLQLEVEEGGGDHE

SEQ ID NO: 3007 - DNA, 402 bp, Alloiococcus otitidis
  CDS (79)..(399)
aagaaggaggcggtgaccatgagtgaagatagacgactttcctttccgatcaaggtcaacttccaggtcctctggcgcttgctcaatttcgccaaacctttttggaaagtgtttgccctagccgtcatcatgatggttttggggtcagctgtagcagcttccttgccgatcatcatccaacaatacattgaccaatacctggtaaccgcttctgtgacctggaccattacccttcgttatgtcctcttttacctagtcttggtggttagccgtggactcttgacctactattcaaactatttatttatgaactcatatgaaatgtcagtagccaatttgcgtcgccaagtttacggcaaggtcacccgactagccatgcggtattttgaccaaaccccctaa

SEQ ID NO: 3008 - protein, 107 aa, Alloiococcus otitidis
MLNFAKPFWKVFALAVIMMVLGSAVAASLPIIIQQYIDQYLVTASVTWTITLRYVLFYLVLVVSRGLLTYYSNYLFMNSYEMSVANLRRQVYGKVTRLAMRYFDQTP

SEQ ID NO: 3009 - DNA, 402 bp, Alloiococcus otitidis; identical to SEQ ID NO: 3007
  CDS (19)..(399)

SEQ ID NO: 3010 - protein, 127 aa, Alloiococcus otitidis
MSEDRRLSFPIKVNFQVLWRLLNFAKPFWKVFALAVIMMVLGSAVAASLPIIIQQYIDQYLVTASVTWTITLRYVLFYLVLVVSRGLLTYYSNYLFMNSYEMSVANLRRQVYGKVTRLAMRYFDQTP

SEQ ID NO: 3011 - DNA, 402 bp, Alloiococcus otitidis; identical to SEQ ID NO: 3007
  CDS (13)..(399)

SEQ ID NO: 3012 - protein, 129 aa, Alloiococcus otitidis
MTMSEDRRLSFPIKVNFQVLWRLLNFAKPFWKVFALAVIMMVLGSAVAASLPIIIQQYIDQYLVTASVTWTITLRYVLFYLVLVVSRGLLTYYSNYLFMNSYEMSVANLRRQVYGKVTRLAMRYFDQTP

SEQ ID NO: 3013 - DNA, 1419 bp, Alloiococcus otitidis
  CDS (394)..(1416)
ccatgcggtattttgaccaaaccccctaatgggtcgatcgtgtcacggattaccaatgacacggaaaccattaaggaattttgggctgtcttcttggaatttgctgatggcctctttaacgccgtagctattgccattgccatgtttaccctggacgcccagtttgctatgatttttgtggcaactatccccattattatcttgttgatgtatgtttaccaaaagtattcgactgttatatatggtcggatgcgggaagccttgtccatggtgaacactgagcttagtgaatcaatttctggtatggatactatccagcacttcaaccaagaagaacggaagaaagaagagttcgatgaagttaaccaaaaatatgttgatgccagaatccgtatgtttaaaatgaatgctgtattactcatgccggctataagctttattgaatccatggtcttagtggtcttgttatctgttttcggctaccaatttttcaacaactttgccgtcaatgtcggggttatttatgcctttacttcctatactcgggccttctaccgcccaatcgggaacatgatcaacagcttgtctatctatcaagatgggatcgtctccggttaccgggttatccgccttcttgaccggactgacttagcaccaacagctggcgaccaggcccagggggagattacagatggacatattaaactttctcatgttactttctcctatgacggggagcgggatgtcttaaaagatatcaatatcgaagccaagcccggccaaaccattgccctagttggtcagactgggtcaggcaagagctcgattatcaacctcctcatgcgcttttatgaattcaaccagggcgagattaccattgacggtcagtctatccgtgatatcaaagatgaagaactgagagaaaaaattggcctggtcctacaagatagtttcttattctatgggaatatcaaggataatattgctatgtttggggatttcagcgaccacgagatccgccaggcagctgaatttgtcaatgctgacaagatcatcaaccagctcgatggcaactaccaggcccgggtcattgaaggaggagcagccttctcaactggtgagaagcaacttttaagttttgcccggaccatcttgcgccaaccgaaaatccttatcttggatgaggcgacggccaacattgacactgaaacagaagaaatcatccagcatggtctccagcaaatccggcagggacggaccaccatcatgattgcccaccgcctgtccaccattaaggatgccgaccaaatttatgtcttgcgtcatggggaaattattgagcaaggcaagcacgaagacctgatccgccagcagggaacttactacaagatgtaccagttgcaaacttctgaccagtaa

SEQ ID NO: 3014 - protein, 341 aa, Alloiococcus otitidis
MFKMNAVLLMPAISFIESMVLVVLLSVFGYQFFNNFAVNVGVIYAFTSYTRAFYRPIGNMINSLSIYQDGIVSGYRVIRLLDRTDLAPTAGDQAQGEITDGHIKLSHVTFSYDGERDVLKDINIEAKPGQTIALVGQTGSGKSSIINLLMRFYEFNQGEITIDGQSIRDIKDEELREKIGLVLQDSFLFYGNIKDNIAMFGDFSDHEIRQAAEFVNADKIINQLDGNYQARVIEGGAAFSTGEKQLLSFARTILRQPKILILDEATANIDTETEEIIQHGLQQIRQGRTTIMIAHRLSTIKDADQIYVLRHGEIIEQGKHEDLIRQQGTYYKMYQLQTSDQ

SEQ ID NO: 3015 - DNA, 1419 bp, Alloiococcus otitidis; identical to SEQ ID NO: 3013
  CDS (142)..(1416)

SEQ ID NO: 3016 - protein, 425 aa, Alloiococcus otitidis
MFTLDAQFAMIFVATIPIIILLMYVYQKYSTVIYGRMREALSMVNTELSESISGMDTIQHFNQEERKKEEFDEVNQKYVDARIRMFKMNAVLLMPAISFIESMVLVVLLSVFGYQFFNNFAVNVGVIYAFTSYTRAFYRPIGNMINSLSIYQDGIVSGYRVIRLLDRTDLAPTAGDQAQGEITDGHIKLSHVTFSYDGERDVLKDINIEAKPGQTIALVGQTGSGKSSIINLLMRFYEFNQGEITIDGQSIRDIKDEELREKIGLVLQDSFLFYGNIKDNIAMFGDFSDHEIRQAAEFVNADKIINQLDGNYQARVIEGGAAFSTGEKQLLSFARTILRQPKILILDEATANIDTETEEIIQHGLQQIRQGRTTIMIAHRLSTIKDADQIYVLRHGEIIEQGKHEDLIRQQGTYYKMYQLQTSDQ

SEQ ID NO: 3017 - DNA, 1419 bp, Alloiococcus otitidis; identical to SEQ ID NO: 3013
  CDS (40)..(1416)

SEQ ID NO: 3018 - protein, 459 aa, Alloiococcus otitidis
MSRITNDTETIKEFWAVFLEFADGLFNAVAIAIAMFTLDAQFAMIFVATIPIIILLMYVYQKYSTVIYGRMREALSMVNTELSESISGMDTIQHFNQEERKKEEFDEVNQKYVDARIRMFKMNAVLLMPAISFIESMVLVVLLSVFGYQFFNNFAVNVGVIYAFTSYTRAFYRPIGNMINSLSIYQDGIVSGYRVIRLLDRTDLAPTAGDQAQGEITDGHIKLSHVTFSYDGERDVLKDINIEAKPGQTIALVGQTGSGKSSIINLLMRFYEFNQGEITIDGQSIRDIKDEELREKIGLVLQDSFLFYGNIKDNIAMFGDFSDHEIRQAAEFVNADKIINQLDGNYQARVIEGGAAFSTGEKQLLSFARTILRQPKILILDEATANIDTETEEIIQHGLQQIRQGRTTIMIAHRLSTIKDADQIYVLRHGEIIEQGKHEDLIRQQGTYYKMYQLQTSDQ

SEQ ID NO: 3019 - DNA, 1419 bp, Alloiococcus otitidis; identical to SEQ ID NO: 3013
  CDS (13)..(1416)

SEQ ID NO: 3020 - protein, 468 aa, Alloiococcus otitidis
MTKPPNGSIVSRITNDTETIKEFWAVFLEFADGLFNAVAIAIAMFTLDAQFAMIFVATIPIIILLMYVYQKYSTVIYGRMREALSMVNTELSESISGMDTIQHFNQEERKKEEFDEVNQKYVDARIRMFKMNAVLLMPAISFIESMVLVVLLSVFGYQFFNNFAVNVGVIYAFTSYTRAFYRPIGNMINSLSIYQDGIVSGYRVIRLLDRTDLAPTAGDQAQGEITDGHIKLSHVTFSYDGERDVLKDINIEAKPGQTIALVGQTGSGKSSIINLLMRFYEFNQGEITIDGQSIRDIKDEELREKIGLVLQDSFLFYGNIKDNIAMFGDFSDHEIRQAAEFVNADKIINQLDGNYQARVIEGGAAFSTGEKQLLSFARTILRQPKILILDEATANIDTETEEIIQHGLQQIRQGRTTIMIAHRLSTIKDADQIYVLRHGEIIEQGKHEDLIRQQGTYYKMYQLQTSDQ

SEQ ID NO: 3021 - DNA, 432 bp, Alloiococcus otitidis
  CDS (31)..(429)
ctggggacggttggtccaggagggttaataatgacccagactataaaaatggccaaggtggcaattaaaatgggggttaaaatattaccgataatgtcaatgaccttaccttcattaatcacaaagtacaaggtgatggcaaagaagacaagagaggtcacaacgggcgaaacattgggaaagttcggctggattgcaatctcatggacggttgctgcagtacgaggtacagcaacaaaggtcgcaattgacaaaatagcgataatgcccagagctttcgcaaagttggggccaaccctccttccaatgtcttcagcctggccacctaattttgccgtgataatgacaactaagatggctaagaaagggtcggttaaaataaaacctaccatcgagctaaaccagttatcacctgcattcagtcctaggtaa

SEQ ID NO: 3022 - protein, 133 aa, Alloiococcus otitidis
MTQTIKMAKVAIKMGVKILPIMSMTLPSLITKYKVMAKKTREVTTGETLGKFGWIAISWTVAAVRGTATKVAIDKIAIMPRAFAKLGPTLLPMSSAWPPNFAVIMTTKMAKKGSVKIKPTIELNQLSPAFSPR

SEQ ID NO: 3023 - DNA, 1359 bp, Alloiococcus otitidis
  CDS (886)..(1356)
gagtggatcacaatgagtaaaagagcaagagatgttatcatcgtaggcttcgccctttttgctatattctttggggcagggaacttaatctttcccgtttacctaggactgaatgcaggtgataactggtttagctcgatggtaggttttattttaaccgaccctttcttagccatcttagttgtcattatcacggcaaaattaggtggccaggctgaagacattggaaggagggttggccccaactttgcgaaagctctgggcattatcgctattttgtcaattgcgacctttgttgctgtacctcgtactgcagcaaccgtccatgagattgcaatccagccgaactttcccaatgtttcgcccgttgtgacctctcttgtcttctttgccatcaccttgtactttgtgattaatgaaggtaaggtcattgacattatcggtaatattttaacccccattttaattgccaccttggccatttttatagtctgggtcattattaaccctcctggaccaaccgtccccagtcaaattgaaagcagtgacttcctagtcggctttaccgagggctaccaaaccatggatgccttaggggctaacctgatggccgggattgtggttactgacttagtccggagaggttacacagacaaggaaaaacgttataaaaatacaattggggtgggcattattgcctttatcttacttagcctagtttatggtggcttggtctatgtaggggcccgtttctcagctatctacccagttgatatgtcccggacccaactgctgattgctagtttctcttacatttttggcgactttggagcctttctaatttccgttgttgtcactctggcttgtctaaccacttcagttggtttgaccgcaacctgtggcgactatttccagactatttccaaaaacaagttgaaatacagacctattgtgattacctcggtcaccatcggcctgctgatttctctcttgtcagtcgatgagattgtcgccttcaccggtcccttgctagaccttgtttacccggtcgtgatggccttggcccttttctccctctttaacgaatacttgaaatatgacttgatcttcgttggaggcgtagccggagcctttgctgtagccttaatagaaaccagtttaggcctgcttggcatggatgctgccctagaaagctggaccgcctttgttcccctagctgaagttggttttggctggttgatcccagctttaatcggtggtttaattggcggactcctaggtcacttctttgacttgggtaaacgcttggaagaccatgacaaccagagagctgtcctgtcagagacttcctacacataa

SEQ ID NO: 3024 - protein, 157 aa, Alloiococcus otitidis
MTATCGDYFQTISKNKLKYRPIVITSVTIGLLISLLSVDEIVAFTGPLLDLVYPVVMALALFSLFNEYLKYDLIFVGGVAGAFAVALIETSLGLLGMDAALESWTAFVPLAEVGFGWLIPALIGGLIGGLLGHFFDLGKRLEDHDNQRAVLSETSYT

SEQ ID NO: 3025 - DNA, 1359 bp, Alloiococcus otitidis; identical to SEQ ID NO: 3023
  CDS (775)..(1356)

SEQ ID NO: 3026 - protein, 194 aa, Alloiococcus otitidis
MSRTQLLIASFSYIFGDFGAFLISVVVTLACLTTSVGLTATCGDYFQTISKNKLKYRPIVITSVTIGLLISLLSVDEIVAFTGPLLDLVYPVVMALALFSLFNEYLKYDLIFVGGVAGAFAVALIETSLGLLGMDAALESWTAFVPLAEVGFGWLIPALIGGLIGGLLGHFFDLGKRLEDHDNQRAVLSETSYT

SEQ ID NO: 3027 - DNA, 1359 bp, Alloiococcus otitidis; identical to SEQ ID NO: 3023
  CDS (13)..(1356)

SEQ ID NO: 3028 - protein, 448 aa, Alloiococcus otitidis
MSKRARDVIIVGFALFAIFFGAGNLIFPVYLGLNAGDNWFSSMVGFILTDPFLAILVVIITAKLGGQAEDIGRRVGPNFAKALGIIAILSIATFVAVPRTAATVHEIAIQPNFPNVSPVVTSLVFFAITLYFVINEGKVIDIIGNILTPILIATLAIFIVWVIINPPGPTVPSQIESSDFLVGFTEGYQTMDALGANLMAGIVVTDLVRRGYTDKEKRYKNTIGVGIIAFILLSLVYGGLVYVGARFSAIYPVDMSRTQLLIASFSYIFGDFGAFLISVVVTLACLTTSVGLTATCGDYFQTISKNKLKYRPIVITSVTIGLLISLLSVDEIVAFTGPLLDLVYPVVMALALFSLFNEYLKYDLIFVGGVAGAFAVALIETSLGLLGMDAALESWTAFVPLAEVGFGWLIPALIGGLIGGLLGHFFDLGKRLEDHDNQRAVLSETSYT

SEQ ID NO: 3029 - DNA, 924 bp, Alloiococcus otitidis
  CDS (331)..(921)
tggaggaaacttatgtcttatatttggatggttattaaaggaatcctggtcggggttgccaatttaatccctggggtcagtggtggaacgatggctgtttctttagccatttacgatgacttgatctttgccatcacccatctgaaaaaagcctttaaaaaatcaatgtcaattctattgcccctagctcttggtatccttttagggatcgtctttttttcatacgctattgaggtcctcttgagccaatataccttccccactgccatggcctttgtgggtttggttttaggtggccttccgattttactccgccagttcgctcataccttgaagactgaaagggaatccattggctggagccagctagtcgtctttaccctcttttttgccctcatcgtggtcctatccttttaccaagaatcagacgtgacctttgaagccttagacctgactttagctaatcttgccattttattttttgtcggcttgattgcagcagccaccatggtaatacctggtatcagtggttccttggtcctgatgattttgggttactattataatattatcaataccttaaccaacttctttgatgccttgagaagtctagatacacaaggcatcctccacggtctagccctcctcattccttttggccttggtgtcttagtcggtatcttcttgatcagtaaaatcattgaatacctctttgccaaccaacccgttctaacttacagtggaatatttggtctagtcctagcttcccccattgcgattttattgaatacaggggcaatcgcttccctgtctagcttaccagttgaccaaatgattcgttttgtcagcacaggtggtctcctactagccctttgctttatagggacctactggctgggccaggctggcgaccagtctgagtag

SEQ ID NO: 3030 - protein, 197 aa, Alloiococcus otitidis
MKTERESIGWSQLVVFTLFFALIVVLSFYQESDVTFEALDLTLANLAILFFVGLIAAATMVIPGISGSLVLMILGYYYNIINTLTNFFDALRSLDTQGILHGLALLIPFGLGVLVGIFLISKIIEYLFANQPVLTYSGIFGLVLASPIAILLNTGAIASLSSLPVDQMIRFVSTGGLLLALCFIGTYWLGQAGDQSE

SEQ ID NO: 3031 - DNA, 924 bp, Alloiococcus otitidis; identical to SEQ ID NO: 3029
  CDS (121)..(921)

SEQ ID NO: 3032 - protein, 267 aa, Alloiococcus otitidis
MIFAITHLKKAFKKSMSILLPLALGILLGIVFFSYAIEVLLSQYTFPTAMAFVGLVLGGLPILLRQFAHTLKTERESIGWSQLVVFTLFFALIVVLSFYQESDVTFEALDLTLANLAILFFVGLIAAATMVIPGISGSLVLMILGYYYNIINTLTNFFDALRSLDTQGILHGLALLIPFGLGVLVGIFLISKIIEYLFANQPVLTYSGIFGLVLASPIAILLNTGAIASLSSLPVDQMIRFVSTGGLLLALCFIGTYWLGQAGDQSE

SEQ ID NO: 3033 - DNA, 924 bp, Alloiococcus otitidis; identical to SEQ ID NO: 3029
  CDS (13)..(921)

SEQ ID NO: 3034 - protein, 303 aa, Alloiococcus otitidis
MSYIWMVIKGILVGVANLIPGVSGGTMAVSLAIYDDLIFAITHLKKAFKKSMSILLPLALGILLGIVFFSYAIEVLLSQYTFPTAMAFVGLVLGGLPILLRQFAHTLKTERESIGWSQLVVFTLFFALIVVLSFYQESDVTFEALDLTLANLAILFFVGLIAAATMVIPGISGSLVLMILGYYYNIINTLTNFFDALRSLDTQGILHGLALLIPFGLGVLVGIFLISKIIEYLFANQPVLTYSGIFGLVLASPIAILLNTGAIASLSSLPVDQMIRFVSTGGLLLALCFIGTYWLGQAGDQSE

SEQ ID NO: 3035 - DNA, 786 bp, Alloiococcus otitidis
  CDS (4)..(783)
aaaatgcgcgagaaaattttccaaattattagtgtccaagatagcgactcccttgctagcaaggcctataatacggtcaatatctttttgattttgatcagcttgctgcctttaatgtttaaaagtcaagatcccctcttacaatttattgataacttggtcttagttttttttattgtcgaatattttcttcactttattacagctgatatcaagtatgatgacctgcccaagcaccaagccttccttcgctacccagtatctttttttgggatagtcgacctactctccatcctccccatgatggaatttgtctcttcctctttccgactcctccgtctatttagactggtccagtcggctagggtttttcgagtctttaaaatctttcgttactccaatagtattgatatcttaatcaaggccattatccgccaaaaagactccctccagttagtcttatggactgctgttttatacctactaattacctcgcttttgatctttaatatcgaaccagaatcctttccaagctttatggatgctctcttttggtcagccggagccttaacatcggcaacttttggggattactttcctagcagtccccaaggccaattgattggcatcttgtcctttatggtcggagtcctcatcattgccttgccttccagtattattacggcaggctatgttgacgaactcaaggcccacagtaatatagaggaccaaaacggccaagaacaagaagacgagcaagcacaagaaaaaagcccagaccgatag

SEQ ID NO: 3036 - protein, 260 aa, Alloiococcus otitidis
MREKIFQIISVQDSDSLASKAYNTVNIFLILISLLPLMFKSQDPLLQFIDNLVLVFFIVEYFLHFITADIKYDDLPKHQAFLRYPVSFFGIVDLLSILPMMEFVSSSFRLLRLFRLVQSARVFRVFKIFRYSNSIDILIKAIIRQKDSLQLVLWTAVLYLLITSLLIFNIEPESFPSFMDALFWSAGALTSATFGDYFPSSPQGQLIGILSFMVGVLIIALPSSIITAGYVDELKAHSNIEDQNGQEQEDEQAQEKSPDR

SEQ ID NO: 3037 - DNA, 636 bp, Alloiococcus otitidis
  CDS (70)..(633)
ttaggatgtcaaagcgtgactaatattaatcatatccgcaagcaaattaaaaaccaccgggccaagtttttgggctacaagtttgagtcgtctgtcctccttcccctcgtttactaccaagggcagtggcagattttatacgagatacggagccaatatgtttctcaaccaggcgaagtctccttcccaggcggacggatcgaaaaaggtgaaagcccccttcaagccggtctaagggaaaccaaggaagaaattggcttccccgttgaaaaaattgaagtcttaggtgaaattgaccggattgctaatggccgggtcatggtctactgtcatgttgggatcttagaagactttgacccagaccagttaaagatcaaccgctacgaagtcgacagtatcttttttaaaccggtccaatattttatcgacaatgccccagaaatttaccattacaatgtagaaagccaattcgaacgcaacttccccagcaataaattcaagtctatcaacgaaacagcctacaaaaggggtcggtcccaaagctctctccccttctatgaatttaaagaggctaccttgtgggggttgacggcccaattaacccgccactttgctaacttagtcggtcaagtctag

SEQ ID NO: 3038 - protein, 188 aa, Alloiococcus otitidis
MGYKFESSVLLPLVYYQGQWQILYEIRSQYVSQPGEVSFPGGRIEKGESPLQAGLRETKEEIGFPVEKIEVLGEIDRIANGRVMVYCHVGILEDFDPDQLKINRYEVDSIFFKPVQYFIDNAPEIYHYNVESQFERNFPSNKFKSINETAYKRGRSQSSLPFYEFKEATLWGLTAQLTRHFANLVGQV

SEQ ID NO: 3039 - DNA, 636 bp, Alloiococcus otitidis; identical to SEQ ID NO: 3037
  CDS (16)..(633)

SEQ ID NO: 3040 - protein, 206 aa, Alloiococcus otitidis
MTNINHIRKQIKNHRAKFLGYKFESSVLLPLVYYQGQWQILYEIRSQYVSQPGEVSFPGGRIEKGESPLQAGLRETKEEIGFPVEKIEVLGEIDRIANGRVMVYCHVGILEDFDPDQLKINRYEVDSIFFKPVQYFIDNAPEIYHYNVESQFERNFPSNKFKSINETAYKRGRSQSSLPFYEFKEATLWGLTAQLTRHFANLVGQV

SEQ ID NO: 3041 - DNA, 210 bp, Alloiococcus otitidis
  CDS (1)..(207)
atgaaaaggagtttgattgaaatgacttcaaaagatgaattaaaaggaaaagccaaagaagcttacggtaagcttgtggatgatgacaagaaaaaaagtgaaggcaaaacggaccaagtgaaaggcaaggtcaatgaagccaaagatagtgttaaagacagtttggaaggtgtcaaagaaagcctaagttcagacgataaagacgactaa

SEQ ID NO: 3042 - protein, 69 aa, Alloiococcus otitidis
MKRSLIEMTSKDELKGKAKEAYGKLVDDDKKKSEGKTDQVKGKVNEAKDSVKDSLEGVKESLSSDDKDD

SEQ ID NO: 3043 - DNA, 729 bp, Alloiococcus otitidis
  CDS (28)..(726)
catcaacgaaataggaggaatgtttcgatgaaaaaatggactaagttgttatcaattcctgtagcagttactctactcgcagcttgcggtgacaatactgctcaagaagacccagcagaagaccctacagtagaagaaactgctcctgaagaagaagcagggattgaccaaactgctgaagacgacatgaacgaagacgacacaactgaagacgacacaactgaagatgacacaactgaagacggcacagctgaagacggcacagctgaagatgacacagaagacgatacagcagacgctgaatcaggtgcttctgtcatccaaacagctgatgaagctcaagatgctatgtcagctgatggggaatggattgttgtcctagaacaagacctacaagttgatgaagacttgacccttgaagctcaagacaacgaagaaggcgaacgtaaactagctttctacgatgacgaaggcgatgaaactcaactttacaccctaacagttccatcccttacaatcgaagctgaaaacacccgctttgctggccgtgttgaaggtgacgttattgtagatgcagacggattctcctttgaaaacgatcctgaaattgatggtgacttgattttcacaagtcaagaattccacgattcagctgactttgacgaagcttctgtaactggtgaagtcattattgaagatggcgaaggaaccgaggaccaagctcaataa

SEQ ID NO: 3044 - protein, 233 aa, Alloiococcus otitidis
MKKWTKLLSIPVAVTLLAACGDNTAQEDPAEDPTVEETAPEEEAGIDQTAEDDMNEDDTTEDDTTEDDTTEDGTAEDGTAEDDTEDDTADAESGASVIQTADEAQDAMSADGEWIVVLEQDLQVDEDLTLEAQDNEEGERKLAFYDDEGDETQLYTLTVPSLTIEAENTRFAGRVEGDVIVDADGFSFENDPEIDGDLIFTSQEFHDSADFDEASVTGEVIIEDGEGTEDQAQ

SEQ ID NO: 3045 - DNA, 576 bp, Alloiococcus otitidis
  CDS (7)..(573)
atccctatgaaggagagtggaatgatgttttataaggctgatcacttgggaagattagaccactttacagccagacacttggccgttatggcggttgtcatggccttaagaatagccctgtcgcttattcctgccttgaatattgctaacctagttcagtggggctttggttttatcggaacaggtattgcggcttccctttttgggccagtttacatggtcttatttgctgttttatatgacttgctggacagcctgattatccaagcaagtacagtctttttcccaggctttacggtgagtgccggtttggctggccttatttatgctgtctttttatggcggaaaaagcccacccttaaacggatcggcctagcaactttccttgtttctctttttatcaatattggcttaaacaccatttggctcaaaataatgtatgatgaagcttggcgtgggctgatcatcccccgaattgtcaagaacgcgatcagcttcccactcaatacagctattctttatttcattttaaacctgccgtcgatccgaaatgttatcaagaaattccagttctaa

SEQ ID NO: 3046 - protein, 189 aa, Alloiococcus otitidis
MKESGMMFYKADHLGRLDHFTARHLAVMAVVMALRIALSLIPALNIANLVQWGFGFIGTGIAASLFGPVYMVLFAVLYDLLDSLIIQASTVFFPGFTVSAGLAGLIYAVFLWRKKPTLKRIGLATFLVSLFINIGLNTIWLKIMYDEAWRGLIIPRIVKNAISFPLNTAILYFILNLPSIRNVIKKFQF

SEQ ID NO: 3047 - DNA, 786 bp, Alloiococcus otitidis
  CDS (187)..(783)
aaaagcgagcgaaagaaggcttattccttgtaccaatttactgattttgaacaccacagccagctggtcgatgacaatgaattctttgcccaatacctgtcccctgattatccttggcggtatgactctaattttttcctgttgaaatttcaaccggacctccaggaattcaaattaattgaagagatgcaaatcgcttcccatcgacaaaacaagctgggtcatttaaaattctattggcctcaaaatactcccctaactccatccgtcacaaaatatctgaacaaggaagattatgggctagagcttttagatttgtaccggctaaagcccggaaactttaaggaccaagtatctaaccttgccgttaaaaaccaagtcttatccagtaaaaagcttggggcctttaagtcctttaactaccagcatgaccaacatgtttcaaaagcgtttgctcaaagcaagctgaatttctacgatgacctccttgctaaacctggcattgactttttgaccagccagctggaccaagaaatcatagctagccttattcaaatcgaaaaagatcggactattgaaatcgatgacctctatgtccaccccaattaccggcatcaaaaaatagccagcaccctggtcaaccaggttgctgactatgccaaaagtcgggataaggaccttatcttactggcagatggggaggatagcgtgggggtcatgtacaccaaactcggctttagccaaaccgggtcccttatcggagcaagtaagaaattaagcttttaa

SEQ ID NO: 3048 - protein, 199 aa, Alloiococcus otitidis
MQIASHRQNKLGHLKFYWPQNTPLTPSVTKYLNKEDYGLELLDLYRLKPGNFKDQVSNLAVKNQVLSSKKLGAFKSFNYQHDQHVSKAFAQSKLNFYDDLLAKPGIDFLTSQLDQEIIASLIQIEKDRTIEIDDLYVHPNYRHQKIASTLVNQVADYAKSRDKDLILLADGEDSVGVMYTKLGFSQTGSLIGASKKLSF

SEQ ID NO: 3049 - DNA, 786 bp, Alloiococcus otitidis; identical to SEQ ID NO: 3047
  CDS (28)..(783)

SEQ ID NO: 3050 - protein, 252 aa, Alloiococcus otitidis
MYQFTDFEHHSQLVDDNEFFAQYLSPDYPWRYDSNFFLLKFQPDLQEFKLIEEMQIASHRQNKLGHLKFYWPQNTPLTPSVTKYLNKEDYGLELLDLYRLKPGNFKDQVSNLAVKNQVLSSKKLGAFKSFNYQHDQHVSKAFAQSKLNFYDDLLAKPGIDFLTSQLDQEIIASLIQIEKDRTIEIDDLYVHPNYRHQKIASTLVNQVADYAKSRDKDLILLADGEDSVGVMYTKLGFSQTGSLIGASKKLSF

SEQ ID NO: 3051 - DNA, 1326 bp, Alloiococcus otitidis
  CDS (193)..(1323)
atattgaaaaaagaacagattcttaaattactggccactagcttagtcggcagccaagtgtttttcgcttctcatcttgtccttgctgaagaagctagttcccagctcttagaggaactgaggcaaagccgtcaagacttggaccaagaaaatgcccagcttgaatcggaaataaagacctctaaagatgaaatgtccaatctttcccaagaaaaggcagatttggaagaagagatccaagctatccaaagcaatgtcgatcaattaatagctgaaattgaccaaagacaagaggagatccaagacaaggaagatcaaatcgaccaattacataaggaaataggcgaattgaccgaattgattgaccgccggacggaaaaagtggctgaccaagctcggtctgtccaaaaaacgggggacgtgacctcgattgtccatgccctcctgtcttcggatactgttgctgaccttcttaaccgacttcactttatttcagaaattatctcttccaaccggtccatcatctctgaccaaaaagctgaccatgaccggctaaaagccagccaagaaaaactggaagcagaagaggcagacttgaaggcggctaagtgggacttggaagtggcccaaaataacttggtcaaccagcgacttgccttagaaagccaggtcagtcaagtagccctagcttatgacttaaaccaaaaagacctggccactttagaagctaaaaaggatgaaatcgcccgccagactagccatttagaccagcaagttcaagctgagcaagaacgtctggaagaagagcggcttgagcaagagagactagctcgagaagaggctgaacgccagcgtcaacaagcggaagaagctgagcgcattcgccaagcagaagcccaggctaaagaggaggccaaagcccaagccaaggaggaagccgaagctcaagccaaatctcaagagagccagcaaggtcaagcggaagaagtcgagcgagaggtcgaagaagaaaatagggatagagaggaagacgaccagcaagcttcccagcttgaaagtagcctgacagggcaaagttcagcttccactgtagttcaagcttctagttcactgaatccctctggctgggtacgacccgcaattggccggatgacatctggctttggttaccgcctccacccaattaagggctatcgtaagctacatgaaggaatagacattgcaggaagcggaccagtgcgggcgtctaaagccggccgggttatcgttgcatcgtatacggctggtttgggttaccacgtccgcatcgaccacggcggagcttaa

SEQ ID NO: 3052 - protein, 377 aa, Alloiococcus otitidis
MSNLSQEKADLEEEIQAIQSNVDQLIAEIDQRQEEIQDKEDQIDQLHKEIGELTELIDRRTEKVADQARSVQKTGDVTSIVHALLSSDTVADLLNRLHFISEIISSNRSIISDQKADHDRLKASQEKLEAEEADLKAAKWDLEVAQNNLVNQRLALESQVSQVALAYDLNQKDLATLEAKKDEIARQTSHLDQQVQAEQERLEEERLEQERLAREEAERQRQQAEEAERIRQAEAQAKEEAKAQAKEEAEAQAKSQESQQGQAEEVEREVEEENRDREEDDQQASQLESSLTGQSSASTVVQASSSLNPSGWVRPAIGRMTSGFGYRLHPIKGYRKLHEGIDIAGSGPVRASKAGRVIVASYTAGLGYHVRIDHGGA

SEQ ID NO: 3053 - DNA, 1326 bp, Alloiococcus otitidis; identical to SEQ ID NO: 3051
  CDS (58)..(1323)

SEQ ID NO: 3054 - protein, 422 aa, Alloiococcus otitidis
MFFASHLVLAEEASSQLLEELRQSRQDLDQENAQLESEIKTSKDEMSNLSQEKADLEEEIQAIQSNVDQLIAEIDQRQEEIQDKEDQIDQLHKEIGELTELIDRRTEKVADQARSVQKTGDVTSIVHALLSSDTVADLLNRLHFISEIISSNRSIISDQKADHDRLKASQEKLEAEEADLKAAKWDLEVAQNNLVNQRLALESQVSQVALAYDLNQKDLATLEAKKDEIARQTSHLDQQVQAEQERLEEERLEQERLAREEAERQRQQAEEAERIRQAEAQAKEEAKAQAKEEAEAQAKSQESQQGQAEEVEREVEEENRDREEDDQQASQLESSLTGQSSASTVVQASSSLNPSGWVRPAIGRMTSGFGYRLHPIKGYRKLHEGIDIAGSGPVRASKAGRVIVASYTAGLGYHVRIDHGGA

SEQ ID NO: 3055 - DNA, 1326 bp, Alloiococcus otitidis; identical to SEQ ID NO: 3051
  CDS (4)..(1323)

SEQ ID NO: 3056 - protein, 440 aa, Alloiococcus otitidis
MKKEQILKLLATSLVGSQVFFASHLVLAEEASSQLLEELRQSRQDLDQENAQLESEIKTSKDEMSNLSQEKADLEEEIQAIQSNVDQLIAEIDQRQEEIQDKEDQIDQLHKEIGELTELIDRRTEKVADQARSVQKTGDVTSIVHALLSSDTVADLLNRLHFISEIISSNRSIISDQKADHDRLKASQEKLEAEEADLKAAKWDLEVAQNNLVNQRLALESQVSQVALAYDLNQKDLATLEAKKDEIARQTSHLDQQVQAEQERLEEERLEQERLAREEAERQRQQAEEAERIRQAEAQAKEEAKAQAKEEAEAQAKSQESQQGQAEEVEREVEEENRDREEDDQQASQLESSLTGQSSASTVVQASSSLNPSGWVRPAIGRMTSGFGYRLHPIKGYRKLHEGIDIAGSGPVRASKAGRVIVASYTAGLGYHVRIDHGGA

SEQ ID NO: 3057 - DNA, 807 bp, Alloiococcus otitidis
  CDS (61)..(804)
cccttgccaggccttgccaaagatgatttactaatattaaaagtattgaaggagtcaaatatgattacttcccggaaaaacccccaagtaaaagattggatcaagttgaaaaccaagaaagagcgcgaaaaacgccagcttttcctactagaaggctaccacctgattgaagaagctatgagggcccaggaggatgttaaagaaattattggaacccaagcagccttagaaaattacaccccatcccggcaagatatccccacccacttggtcactgaagccatcagccaggacatggctgacacaaaaacaagtcagggaatttttgcggttgttaggcctaactaccaagccaaaagaccccatcaaaaagtccttttgctagaccaggtccaagatccaggcaacctggggaccatgatccggtcggctgatgcagctggttttgacctggttgccatgggaaaggggacagttgatgcttataaccagaaggtcttgcggtccgcccaaggaagccattttcacttagacttggccaatgttgacttaaagagctttataccccaactccaagaccagggactggttgtttacgggacagacctgtccgctgagtctgttccctataaagagctcaaaactagtggtaagattgctgtggtggtaggaaatgaaggccaggggatggccccggacttgctgggtttggtggaccaaaacacccatattcccatcaagggccaggcagagtcactaaatgtagccattgccgcttcaattttaatgtttcacttttctgaatag

SEQ ID NO: 3058 - protein, 248 aa, Alloiococcus otitidis
MITSRKNPQVKDWIKLKTKKEREKRQLFLLEGYHLIEEAMRAQEDVKEIIGTQAALENYTPSRQDIPTHLVTEAISQDMADTKTSQGIFAVVRPNYQAKRPHQKVLLLDQVQDPGNLGTMIRSADAAGFDLVAMGKGTVDAYNQKVLRSAQGSHFHLDLANVDLKSFIPQLQDQGLVVYGTDLSAESVPYKELKTSGKIAVVVGNEGQGMAPDLLGLVDQNTHIPIKGQAESLNVAIAASILMFHFSE

SEQ ID NO: 3059 - DNA, 807 bp, Alloiococcus otitidis; identical to SEQ ID NO: 3057
  CDS (4)..(804)

SEQ ID NO: 3060 - protein, 267 aa, Alloiococcus otitidis
MPGLAKDDLLILKVLKESNMITSRKNPQVKDWIKLKTKKEREKRQLFLLEGYHLIEEAMRAQEDVKEIIGTQAALENYTPSRQDIPTHLVTEAISQDMADTKTSQGIFAVVRPNYQAKRPHQKVLLLDQVQDPGNLGTMIRSADAAGFDLVAMGKGTVDAYNQKVLRSAQGSHFHLDLANVDLKSFIPQLQDQGLVVYGTDLSAESVPYKELKTSGKIAVVVGNEGQGMAPDLLGLVDQNTHIPIKGQAESLNVAIAASILMFHFSE

SEQ ID NO: 3061 - DNA, 534 bp, Alloiococcus otitidis
  CDS (13)..(531)
agggatgatggaatgcctatttttgaagatagatggaaatacgatcctgaatatttatcctatgtttcagacttgattaataatgataaatttaggcagttggacaaaatcgtccaccaccaccataccacccggtttaaacactcggtctatgtttcttatgtgtcttaccgaattgcgagacggatgggcttggatgcacgtgcgacagcccgggctggccttttgcatgatttcttcttagaaagtcgcgaagatatccagttgatgcaagaagggtcgcataatgatgtccaccccaaaattgccttgaaaaatgccttaaccttgactgaactttcagacaaagaaaaagacattatcctaaaacacatgttcttgtgttccaaatctaacttcccaagataccgtgagagctatatcgtcacttccgttgataagtattgtgctatggacgaagtttcccgtcctttgcggagtcgcgtgattgccaaataccactccttaaaaggtgccttatcaacccaggcttaa

SEQ ID NO: 3062 - protein, 173 aa, Alloiococcus otitidis
MPIFEDRWKYDPEYLSYVSDLINNDKFRQLDKIVHHHHTTRFKHSVYVSYVSYRIARRMGLDARATARAGLLHDFFLESREDIQLMQEGSHNDVHPKIALKNALTLTELSDKEKDIILKHMFLCSKSNFPRYRESYIVTSVDKYCAMDEVSRPLRSRVIAKYHSLKGALSTQA

SEQ ID NO: 3063 - DNA, 1386 bp, Alloiococcus otitidis
  CDS (877)..(1383)
atgagaggtagcgaaatgacagactatttagaatttaacagagaaaattactataaagatatcatcagttccatcgaaaaggaaaaacaggttacctttaataaactttttttgcgcttgcatgaccgggataaaattgaagtgttcaacatggtggctgatgactacaagaaaaatattgccaatctacttccggcagaagattttgaagatatgtttaaaattatggctatcgaagaccaggaagtggccgttgccaaccttcctaatgactacctccggcaagtttttaaccacctaccttatgatgacatagcctacttcatcaaccggtctagcttgtacgatgacacctttgtgttgaaatacttggatgctgaccggcaaaaagaagtcctggagatcttatcctatgcttctgagactgctgggtcgattatgactaaggaatttatttcggtctatgaggaccaaaccgtccaacgggtgattgactacttaagacaggtaggccaagatgctgagaccatttacaccatttatgtggtggatgaccaggagcaattgaacggggtcttctccctgcgtgaattgatgatgtcgcccaaggacaagttaattgccgatattatgaacacccatgtggtcagtgccagtgttgatacggaccaggaagaggtggccgtctacatccaggactatgacttgacagccctcccggttatttcccatgacggtaagttaaaaggaattatcacggttgatgacattattgacattgtggaccaagaagcggaagaagactttaacgaattagccggtatccggaaacaagatacccatgatgaaaaagggaagcaaaaatcgactatccaaatggcactcagccggaccccctggctggtgatctttatggtgaccggtctattgattgggagtttgatgaacctctttgaaaataccctgcagcgggcggtcctcttgtcagcctttgtcccagctataatggatacggctggtaatgtgggaacccagtcactagcggtaactatcagtagtaataagctttttcaaagtagtataggtcagaagttgttagccttaaaggatgaaatcttaactggcttgattatgggggtcatttcagccctgatgatgtttgtcattatttgggtggtttatggtgaagccttaattggccttatcgttgccctggccttgattgtgacaattaccatctcgactggggtgggactcattgtccccttgttttttgataaaatcggctttgattctagcgtagctagtggaccatttatcaccatcatgtcggatgcagtcggtttggttttctacttttcaatcgcgtcaatttttataggctag

SEQ ID NO: 3064 - protein, 169 aa, Alloiococcus otitidis
MALSRTPWLVIFMVTGLLIGSLMNLFENTLQRAVLLSAFVPAIMDTAGNVGTQSLAVTISSNKLFQSSIGQKLLALKDEILTGLIMGVISALMMFVIIWVVYGEALIGLIVALALIVTITISTGVGLIVPLFFDKIGFDSSVASGPFITIMSDAVGLVFYFSIASIFIG

SEQ ID NO: 3065 - DNA, 1386 bp, Alloiococcus otitidis; identical to SEQ ID NO: 3063
  CDS (16)..(1383)

SEQ ID NO: 3066 - protein, 456 aa, Alloiococcus otitidis
MTDYLEFNRENYYKDIISSIEKEKQVTFNKLFLRLHDRDKIEVFNMVADDYKKNIANLLPAEDFEDMFKIMAIEDQEVAVANLPNDYLRQVFNHLPYDDIAYFINRSSLYDDTFVLKYLDADRQKEVLEILSYASETAGSIMTKEFISVYEDQTVQRVIDYLRQVGQDAETIYTIYVVDDQEQLNGVFSLRELMMSPKDKLIADIMNTHVVSASVDTDQEEVAVYIQDYDLTALPVISHDGKLKGIITVDDIIDIVDQEAEEDFNELAGIRKQDTHDEKGKQKSTIQMALSRTPWLVIFMVTGLLIGSLMNLFENTLQRAVLLSAFVPAIMDTAGNVGTQSLAVTISSNKLFQSSIGQKLLALKDEILTGLIMGVISALMMFVIIWVVYGEALIGLIVALALIVTITISTGVGLIVPLFFDKIGFDSSVASGPFITIMSDAVGLVFYFSIASIFIG

SEQ ID NO: 3067 - DNA, 1386 bp, Alloiococcus otitidis; identical to SEQ ID NO: 3063
  CDS (1)..(1383)

SEQ ID NO: 3068 - protein, 461 aa, Alloiococcus otitidis
MRGSEMTDYLEFNRENYYKDIISSIEKEKQVTFNKLFLRLHDRDKIEVFNMVADDYKKNIANLLPAEDFEDMFKIMAIEDQEVAVANLPNDYLRQVFNHLPYDDIAYFINRSSLYDDTFVLKYLDADRQKEVLEILSYASETAGSIMTKEFISVYEDQTVQRVIDYLRQVGQDAETIYTIYVVDDQEQLNGVFSLRELMMSPKDKLIADIMNTHVVSASVDTDQEEVAVYIQDYDLTALPVISHDGKLKGIITVDDIIDIVDQEAEEDFNELAGIRKQDTHDEKGKQKSTIQMALSRTPWLVIFMVTGLLIGSLMNLFENTLQRAVLLSAFVPAIMDTAGNVGTQSLAVTISSNKLFQSSIGQKLLALKDEILTGLIMGVISALMMFVIIWVVYGEALIGLIVALALIVTITISTGVGLIVPLFFDKIGFDSSVASGPFITIMSDAVGLVFYFSIASIFIG

SEQ ID NO: 3069 - DNA, 609 bp, Alloiococcus otitidis
  CDS (10)..(606)
ggggataccatggaatcacttcaaattaacaaagaccgttactatgatgacatttacaaggcttttgacaatgatgaccgggaaaccttccgcgagctcttcttaagactccacgaaagggaccagcacgagcttttccacctgctttaccccgagaagaaaaagaaaatagcccaattcctctcagccaaggaatttgccgaaatctttgaatggatggcggtggaggacaaggaagccgtgatcaataacctgcctcctgtctacattgcagaagtctttaacaacttggccaatgatgacgtagtggaatttttgacccaaagccaagcaactgatgccgaaaaaatactggacatgatggaccaggatgaacgtaaacgggtccaggaattgatgtcctatgcccaagagacggccggttctatcatgaccaaggaatatattgctatccaagattcccaatcggtaagacggtcttggaccgcttgccgaccattgcggatgaagccgaaaccatctactacctctatgtgcttaacgaagaaggtcagctggtcggtgtcctttccctgcgtgatttactcttggcccaagaagatgaattag

SEQ ID NO: 3070 - protein, 199 aa, Alloiococcus otitidis
MESLQINKDRYYDDIYKAFDNDDRETFRELFLRLHERDQHELFHLLYPEKKKKIAQFLSAKEFAEIFEWMAVEDKEAVINNLPPVYIAEVFNNLANDDVVEFLTQSQATDAEKILDMMDQDERKRVQELMSYAQETAGSIMTKEYIAIQDSQSVRRSWTACRPLRMKPKPSTTSMCLTKKVSWSVSFPCVIYSWPKKMN

SEQ ID NO: 3071 - DNA, 240 bp, Alloiococcus otitidis
  CDS (4)..(237)
gagatgacgccaccacttaaaagacctaagattaaaagaatcaagatccaaggaattctatgcttggtggcttggatggggttgagccttttctcctcactgtcagaaggtctaatcgccgcaaattctatgaagtcttcattagcctcttcttcaataatgtccataatgtcgtctacggtaacaatcccctgcatccggccatcgtggctgacaacgggaactgccagtaagtcatag

SEQ ID NO: 3072 - protein, 78 aa, Alloiococcus otitidis
MTPPLKRPKIKRIKIQGILCLVAWMGLSLFSSLSEGLIAANSMKSSLASSSIMSIMSSTVTIPCIRPSWLTTGTASKS

SEQ ID NO: 3073 - DNA, 996 bp, Alloiococcus otitidis
  CDS (754)..(993)
acgggtccaggaattgatgtcctatgcccaagagacggccggttctatcatgaccaaggaatatattgctatccaagattcccaatcggtaagacggtcttggaccgcttgccgaccattgcggatgaagccgaaaccatctactacctctatgtgcttaacgaagaaggtcagctggtcggtgtcctttccctgcgtgatttactcttggcccaagaagatgaattagtccggaatatcatgttcaaaaatgtcacctcggtccggatcgacatggaccaggaagaagttgcccatgttattcgagactatgacttactggcagttcccgttgtcagccacgatggccggatgcaggggattgttaccgtagacgacattatggacattattgaagaagaggctaatgaagacttcatagaatttgcggcgattagaccttctgacagtgaggagaaaaggctcaaccccatccaagccaccaagcatagaattccttggatcttgattcttttaatcttaggtcttttaagtggtggcgtcatctcctactttgaagagaccttggagtctgtcgttgtcctagcaacctttatcccaatgattatggggacggccgggaatatcggaacccagtccttggcagtagccattaataacttgtctggtgacaagggcgaagatagcaagaagatgatgacggtgatccggagggaagtggtaggaggagccattattggactcttcttagccttgattttagttgccttatcccttattatttatcaaaatactgtcttagccatgattgtcagtaccgccatctttttaaccacgattttatcgtctacagttggggcggtcattcctttgttatttgaggaaatcaatattgaccctgccgttgctagtggccccttcattaccaccatcaacgatattgcatctcttttgatctatttcaggctagccgtcagttttttggaacatttataa

SEQ ID NO: 3074 - protein, 80 aa, Alloiococcus otitidis
MILVALSLIIYQNTVLAMIVSTAIFLTTILSSTVGAVIPLLFEEINIDPAVASGPFITTINDIASLLIYFRLAVSFLEHL

SEQ ID NO: 3075 - DNA, 996 bp, Alloiococcus otitidis; identical to SEQ ID NO: 3073
  CDS (694)..(993)

SEQ ID NO: 3076 - protein, 100 aa, Alloiococcus otitidis
MMTVIRREVVGGAIIGLFLALILVALSLIIYQNTVLAMIVSTAIFLTTILSSTVGAVIPLLFEEINIDPAVASGPFITTINDIASLLIYFRLAVSFLEHL

SEQ ID NO: 3077 - DNA, 996 bp, Alloiococcus otitidis; identical to SEQ ID NO: 3073
  CDS (565)..(993)

SEQ ID NO: 3078 - protein, 143 aa, Alloiococcus otitidis
MESVVVLATFIPMIMGTAGNIGTQSLAVAINNLSGDKGEDSKKMMTVIRREVVGGAIIGLFLALILVALSLIIYQNTVLAMIVSTAIFLTTILSSTVGAVIPLLFEEINIDPAVASGPFITTINDIASLLIYFRLAVSFLEHL

SEQ ID NO: 3079 - DNA, 996 bp, Alloiococcus otitidis; identical to SEQ ID NO: 3073
  CDS (241)..(993)

SEQ ID NO: 3080 - protein, 251 aa, Alloiococcus otitidis
MFKNVTSVRIDMDQEEVAHVIRDYDLLAVPVVSHDGRMQGIVTVDDIMDIIEEEANEDFIEFAAIRPSDSEEKRLNPIQATKHRIPWILILLILGLLSGGVISYFEETLESVVVLATFIPMIMGTAGNIGTQSLAVAINNLSGDKGEDSKKMMTVIRREVVGGAIIGLFLALILVALSLIIYQNTVLAMIVSTAIFLTTILSSTVGAVIPLLFEEINIDPAVASGPFITTINDIASLLIYFRLAVSFLEHL

SEQ ID NO: 3081 - DNA, 996 bp, Alloiococcus otitidis; identical to SEQ ID NO: 3073
  CDS (208)..(993)

SEQ ID NO: 3082 - protein, 262 aa, Alloiococcus otitidis
MAQEDELVRNIMFKNVTSVRIDMDQEEVAHVIRDYDLLAVPVVSHDGRMQGIVTVDDIMDIIEEEANEDFIEFAAIRPSDSEEKRLNPIQATKHRIPWILILLILGLLSGGVISYFEETLESVVVLATFIPMIMGTAGNIGTQSLAVAINNLSGDKGEDSKKMMTVIRREVVGGAIIGLFLALILVALSLIIYQNTVLAMIVSTAIFLTTILSSTVGAVIPLLFEEINIDPAVASGPFITTINDIASLLIYFRLAVSFLEHL

SEQ ID NO: 3083 - DNA, 996 bp, Alloiococcus otitidis; identical to SEQ ID NO: 3073
  CDS (154)..(993)

SEQ ID NO: 3084 - protein, 280 aa, Alloiococcus otitidis
MLNEEGQLVGVLSLRDLLLAQEDELVRNIMFKNVTSVRIDMDQEEVAHVIRDYDLLAVPVVSHDGRMQGIVTVDDIMDIIEEEANEDFIEFAAIRPSDSEEKRLNPIQATKHRIPWILILLILGLLSGGVISYFEETLESVVVLATFIPMIMGTAGNIGTQSLAVAINNLSGDKGEDSKKMMTVIRREVVGGAIIGLFLALILVALSLIIYQNTVLAMIVSTAIFLTTILSSTVGAVIPLLFEEINIDPAVASGPFITTINDIASLLIYFRLAVSFLEHL

SEQ ID NO: 3085 - DNA, 996 bp, Alloiococcus otitidis; identical to SEQ ID NO: 3073
  CDS (100)..(993)

SEQ ID NO: 3086 - protein, 298 aa, Alloiococcus otitidis
MDRLPTIADEAETIYYLYVLNEEGQLVGVLSLRDLLLAQEDELVRNIMFKNVTSVRIDMDQEEVAHVIRDYDLLAVPVVSHDGRMQGIVTVDDIMDIIEEEANEDFIEFAAIRPSDSEEKRLNPIQATKHRIPWILILLILGLLSGGVISYFEETLESVVVLATFIPMIMGTAGNIGTQSLAVAINNLSGDKGEDSKKMMTVIRREVVGGAIIGLFLALILVALSLIIYQNTVLAMIVSTAIFLTTILSSTVGAVIPLLFEEINIDPAVASGPFITTINDIASLLIYFRLAVSFLEHL

SEQ ID NO: 3087 - DNA, 243 bp, Alloiococcus otitidis
  CDS (19)..(240)
ccattacaatggcctaccttggtccgctcaataatgccttcttcttccaagcccttgagccggtcaaccagaacgcggtcgctaatacctgaaatacaggccgcaatttccttaaaccggaggggggattcgagcaaggcatcgataatcaagccgttccattttttacctaggatggaaaaagtatactcaaatttgggacagatagatggagactcatcacttttcgttactaccatataa

SEQ ID NO: 3088 - protein, 74 aa, Alloiococcus otitidis
MVRSIMPSSSKPLSRSTRTRSLIPEIQAAISLNRRGDSSKASIIKPFHFLPRMEKVYSNLGQIDGDSSLFVTTI

SEQ ID NO: 3089 - DNA, 540 bp, Alloiococcus otitidis
  CDS (196)..(537)
tggccccttcattaccaccatcaacgatattgcatctcttttgatctatttcaggctagccgtcagttttttggaacatttataaaaacaattttagtttactttaatgaagcttttagttatactatccttaagctagattattggagaccaatcgtatcgataacatgcaagttaggaagtagaggcgattatatggtagtaacgaaaagtgatgagtctccatctatctgtcccaaatttgagtatactttttccatcctaggtaaaaaatggaacggcttgattatcgatgccttgctcgaatcccccctccggtttaaggaaattgcggcctgtatttcaggtattagcgaccgcgttctggttgaccggctcaagggcttggaagaagaaggcattattgagcggaccaaggtaggccattgtaatggctacagcctgacggaaaagggctatgacctagaacccgtcatgacccaggttcaaaaatgggcagataaatgggttttagatgaagatatcgaagacttgtgttag

SEQ ID NO: 3090 - protein, 114 aa, Alloiococcus otitidis
MVVTKSDESPSICPKFEYTFSILGKKWNGLIIDALLESPLRFKEIAACISGISDRVLVDRLKGLEEEGIIERTKVGHCNGYSLTEKGYDLEPVMTQVQKWADKWVLDEDIEDLC

SEQ ID NO: 3091 - DNA, 1152 bp, Alloiococcus otitidis
  CDS (40)..(1149)
tttgaactagggtggtaccgcgaatggcctcgtccctttatgggcgaggccattttttgtggccaaaaagccaggccaagtaaaaatgtagcaaaggagtcgcatatggatttacaagaaaaattacaggacttgcagcagcaggccttaaaagaaattaaccaagttgaaagtttagaccagttggagtccatccgcctgtcttacctgggcaagaaggggcaggtcacccaggtccttaaggggatgaaggacttagaccccaaagaccgtcccttggtagggaagactgccaatgaagtaagcgatgatattaaagacatggttgaaacgtccaaggaccggttggaaagccaggccctagaccagaaattggcagaagaaaccatcgatgttagcctgccaggccaatccagtgagccgggccaaacccatgtgatcctccaagtgattgaagagttggaggacttgtttattggcatgggctataagattgtggaaggctatgaaattgaaaccgaccactacaactttgaacgggtaaatgttccgaaagaccacccggcccgtgacatgcaggatactttttacattgacgacttgcacctactgagaacccacacctcccccacccaaccacggaccttagaaaaacacgacttttccaagtcacccttgaagatgattagtgtgggcaaggttttccgccgggatactgatgatgctacccactcccaccaattccaccaaattgaaggtttagtggtggacaagagtatttccctaggggacttgaaggggaccttggaagtcatggccaagaaaatcttcggcgacagccgccagatccgcttgcgccccagttacttcccctttaccgaaccctctgttgaagtggacttgtcttgctttaactgtgacggcaagggctgcagtatttgtaagcacaccggttggattgaagtcttaggtgctggtatggtccacccccaagtcttagagatgtccggggttgattctacaagctatagcggttttgccttcgggattggggcggaccgaatcgccatgctgaaatatgaagttgacgatatccgtcatttctacttaaatgaccagcgtttcttgagtcaattcaaagcgaaagggtag

SEQ ID NO: 3092 - protein, 370 aa, Alloiococcus otitidis
MGEAIFCGQKARPSKNVAKESHMDLQEKLQDLQQQALKEINQVESLDQLESIRLSYLGKKGQVTQVLKGMKDLDPKDRPLVGKTANEVSDDIKDMVETSKDRLESQALDQKLAEETIDVSLPGQSSEPGQTHVILQVIEELEDLFIGMGYKIVEGYEIETDHYNFERVNVPKDHPARDMQDTFYIDDLHLLRTHTSPTQPRTLEKHDFSKSPLKMISVGKVFRRDTDDATHSHQFHQIEGLVVDKSISLGDLKGTLEVMAKKIFGDSRQIRLRPSYFPFTEPSVEVDLSCFNCDGKGCSICKHTGWIEVLGAGMVHPQVLEMSGVDSTSYSGFAFGIGADRIAMLKYEVDDIRHFYLNDQRFLSQFKAKG

SEQ ID NO: 3093 - DNA, 1467 bp, Alloiococcus otitidis
  CDS (7)..(1464)
gtaaagatgaaagtatcatacaattggttaggacaatatgtcgatttaatcgatatttcaccagaagaactggccaagcaaattactttaacaggtatcgaagtggagggagtggaccaggctgaccccattccaaaacttttagtgggccatgttaaagattgccagcctatagaagggtcagaccacttgaaattgacccaggtagatgtgggacaagctgaccccgttcaaattgtctgcggagctcctaatattaaagcggacctcaaagtgattgtggccttgccgggagccgttttaccaggggactttcaaattaaaacaaccgctttgctgggccaggaatcagcagggatgatttgttcactagaagagctaggtttcagtgaatcagtggtacccaagtttgcggaagacgggatctatatcttgcctgattcagcccaagtgggagacccagctggaccttatattggcctagacgatgctgttattgacctggatgtcactcctaaccgtgcagacgctttatccatgcgaggggtggcttatgaagttgcagctactttagaccgaccagtccactttgaacccgtccaagtccaggaggatgaaaatacggctcagctttccgttggggtggagtctactgacgatacacccttttatgctagccggattgtggaagacgtcaaggttggtgacagccccctttggcttcaaaaacgcttgatggcagctggcatccgtcccattgattcgattgtggacatcaccaactacatcatgttggaatacggccaacccatgcacgcttttgactatgatgcggtaggaagcaatgaactctatgttcgccgggccaaagaagacgaagtactccgaacactagacggtaaggaccgagacttagggccagacaacctagtggtcaccaatgggagccaggcaattgccctggctggtgtgatggggggcgaaaacacccatgtaacgaacgatacgaaaagaattgctattgaagcagcgatctttgaccctgttatagttcgtaaaacagcccagaaattaaatttaagaagtgaatccagtagccggtttgaaaaaggaattaatgaagctactgttattgaagccttggacaaggcagctgctttgatgcgggatattggtgggggtaaaattgtctcaggtgttgtcaaggatcgtgatctcactccacaagatacgcatgtgtcagccgaccttgcctatatcaaccgcctaagtggagtggactttagccaagaccaggtcggccaaattttaaaccgtctaggattttcttaccaggtggaagaggggcaatttgatgtggctattccaccgagaaggcgagatgtcagtatcgccgctgacctggttgaagaaatcacccgaatttacgggttacaacaaggtgccatccacactgccaaaaactga

SEQ ID NO: 3094 - protein, 486 aa, Alloiococcus otitidis
MKVSYNWLGQYVDLIDISPEELAKQITLTGIEVEGVDQADPIPKLLVGHVKDCQPIEGSDHLKLTQVDVGQADPVQIVCGAPNIKADLKVIVALPGAVLPGDFQIKTTALLGQESAGMICSLEELGFSESVVPKFAEDGIYILPDSAQVGDPAGPYIGLDDAVIDLDVTPNRADALSMRGVAYEVAATLDRPVHFEPVQVQEDENTAQLSVGVESTDDTPFYASRIVEDVKVGDSPLWLQKRLMAAGIRPIDSIVDITNYIMLEYGQPMHAFDYDAVGSNELYVRRAKEDEVLRTLDGKDRDLGPDNLVVTNGSQAIALAGVMGGENTHVTNDTKRIAIEAAIFDPVIVRKTAQKLNLRSESSSRFEKGINEATVIEALDKAAALMRDIGGGKIVSGVVKDRDLTPQDTHVSADLAYINRLSGVDFSQDQVGQILNRLGFSYQVEEGQFDVAIPPRRRDVSIAADLVEEITRIYGLQQGAIHTAKN

SEQ ID NO: 3095 - DNA, 1095 bp, Alloiococcus otitidis
  CDS (181)..(1092)
gattttcttaccaggtggaagaggggcaatttgatgtggctattccaccgagaaggcgagatgtcagtatcgccgctgacctggttgaagaaatcacccgaatttacgggttacaacaaggtgccatccacactgccaaaaactgagaccatcccaggccagttaacccccggccaacggatgaaacgctatctcaaagattatatggaaaacattggtttctcccaggctatatcttatgccctgactaagccagaaaaggcaccacgttttgtgtttggcgatttagccgacaagcaagtggtttccattgcccaccccatgagtaatgaccgccaaagtttacgtcaaagcctcttgtccggtttgctcgatgtggcccaatacaataaggctagacaagtaaactcggtcaagttatttgaattgggttctgttttcggcaaggaccaagaagagtatttggaagaaggacgctttgccggtttattgactggacaggtgacagaagcttcctggagtcagaaggccaaccaagtcgactttttcactgccaagggaattatagagcagttgtgccaattgattggatttgctgccccggtcagttaccaggccaataaggacagagacaatatgcaccccgggcgaacagcggatatttacatcggccaagacctggttggttacttgggccaagtccatcccttgttggccaaggaatatgacctcaaggaagtttatgtatttgaactagacctagacaagctggttgctttagacaagaaagaagctgtctatgacttggttccaaaatacccaggcacttcccgtgacattgccctcctggtagacgagtccattagccaccaaaccattgtagacttgattcggtccaactcttctgatttgcttaaacggattcacctcttcgacctctacaagggcgataacatccaagaaggcaaacagtccctagcttactccctcttctaccaagaccctgcagctactctcaaggatgaaaaagtcgaccaagaattcgataaggtcaaacaagtcctaacagaagaactaaaagcagaaattcgttaa

SEQ ID NO: 3096 - protein, 304 aa, Alloiococcus otitidis
MKRYLKDYMENIGFSQAISYALTKPEKAPRFVFGDLADKQVVSIAHPMSNDRQSLRQSLLSGLLDVAQYNKARQVNSVKLFELGSVFGKDQEEYLEEGRFAGLLTGQVTEASWSQKANQVDFFTAKGIIEQLCQLIGFAAPVSYQANKDRDNMHPGRTADIYIGQDLVGYLGQVHPLLAKEYDLKEVYVFELDLDKLVALDKKEAVYDLVPKYPGTSRDIALLVDESISHQTIVDLIRSNSSDLLKRIHLFDLYKGDNIQEGKQSLAYSLFYQDPAATLKDEKVDQEFDKVKQVLTEELKAEIR

SEQ ID NO: 3097 - DNA, 1095 bp, Alloiococcus otitidis; identical to SEQ ID NO: 3095
  CDS (61)..(1092)

SEQ ID NO: 3098 - protein, 344 aa, Alloiococcus otitidis
MSVSPLTWLKKSPEFTGYNKVPSTLPKTETIPGQLTPGQRMKRYLKDYMENIGFSQAISYALTKPEKAPRFVFGDLADKQVVSIAHPMSNDRQSLRQSLLSGLLDVAQYNKARQVNSVKLFELGSVFGKDQEEYLEEGRFAGLLTGQVTEASWSQKANQVDFFTAKGIIEQLCQLIGFAAPVSYQANKDRDNMHPGRTADIYIGQDLVGYLGQVHPLLAKEYDLKEVYVFELDLDKLVALDKKEAVYDLVPKYPGTSRDIALLVDESISHQTIVDLIRSNSSDLLKRIHLFDLYKGDNIQEGKQSLAYSLFYQDPAATLKDEKVDQEFDKVKQVLTEELKAEIR

SEQ ID NO: 3099 - DNA, 1095 bp, Alloiococcus otitidis; identical to SEQ ID NO: 3095
  CDS (34)..(1092)

SEQ ID NO: 3100 - protein, 353 aa, Alloiococcus otitidis
MWLFHREGEMSVSPLTWLKKSPEFTGYNKVPSTLPKTETIPGQLTPGQRMKRYLKDYMENIGFSQAISYALTKPEKAPRFVFGDLADKQVVSIAHPMSNDRQSLRQSLLSGLLDVAQYNKARQVNSVKLFELGSVFGKDQEEYLEEGRFAGLLTGQVTEASWSQKANQVDFFTAKGIIEQLCQLIGFAAPVSYQANKDRDNMHPGRTADIYIGQDLVGYLGQVHPLLAKEYDLKEVYVFELDLDKLVALDKKEAVYDLVPKYPGTSRDIALLVDESISHQTIVDLIRSNSSDLLKRIHLFDLYKGDNIQEGKQSLAYSLFYQDPAATLKDEKVDQEFDKVKQVLTEELKAEIR

SEQ ID NO: 3101 - DNA, 1095 bp, Alloiococcus otitidis; identical to SEQ ID NO: 3095
  CDS (31)..(1092)

SEQ ID NO: 3102 - protein, 354 aa, Alloiococcus otitidis
MMWLFHREGEMSVSPLTWLKKSPEFTGYNKVPSTLPKTETIPGQLTPGQRMKRYLKDYMENIGFSQAISYALTKPEKAPRFVFGDLADKQVVSIAHPMSNDRQSLRQSLLSGLLDVAQYNKARQVNSVKLFELGSVFGKDQEEYLEEGRFAGLLTGQVTEASWSQKANQVDFFTAKGIIEQLCQLIGFAAPVSYQANKDRDNMHPGRTADIYIGQDLVGYLGQVHPLLAKEYDLKEVYVFELDLDKLVALDKKEAVYDLVPKYPGTSRDIALLVDESISHQTIVDLIRSNSSDLLKRIHLFDLYKGDNIQEGKQSLAYSLFYQDPAATLKDEKVDQEFDKVKQVLTEELKAEIR

SEQ ID NO: 3103 - DNA, 1245 bp, Alloiococcus otitidis; identical to SEQ ID NO: 835
  CDS (16)..(1242)

SEQ ID NO: 3104 - protein, 409 aa, Alloiococcus otitidis; identical to SEQ ID NO: 836

SEQ ID NO: 3105 - DNA, 327 bp, Alloiococcus otitidis
  CDS (64)..(324)
gtgaaatgtcgaatttttcgtgttaaaataggaaagaaattctggtttaaggagcgatatcaagtggcagataaaccgagccggtacaaggccgtcattgatggcagaacgtatacaattgtaggccgtaagtcacaagaacatatgaagactgtgaccgaattagtcgatgctgaattagccgaattaaaaaaagtcactaagaacctcaaggatgaggatcgggccatcttgcttgctgtgaatactaaatcagaacaagttgaattgcagaaaaaagtgattcagctgcaagaaaagttggaaagtttaaatgcccaaatataa

SEQ ID NO: 3106 - protein, 87 aa, Alloiococcus otitidis
MADKPSRYKAVIDGRTYTIVGRKSQEHMKTVTELVDAELAELKKVTKNLKDEDRAILLAVNTKSEQVELQKKVIQLQEKLESLNAQI

SEQ ID NO: 3107 - DNA, 327 bp, Alloiococcus otitidis; identical to SEQ ID NO: 3105
  CDS (1)..(324)

SEQ ID NO: 3108 - protein, 108 aa, Alloiococcus otitidis
MKCRIFRVKIGKKFWFKERYQVADKPSRYKAVIDGRTYTIVGRKSQEHMKTVTELVDAELAELKKVTKNLKDEDRAILLAVNTKSEQVELQKKVIQLQEKLESLNAQI

SEQ ID NO: 3109 - DNA, 603 bp, Alloiococcus otitidis
  CDS (19)..(600)
acggtagtgggggtcagtatgttatttacgttaatcattttgtttatctttatctatagtatttatattggggtaaaaagaggactcatcctccaattactgatgagtatcggcttttttatttcttacggagttgccatggcattacacgaaaatttatctacatatgttgaaatgctcgtaccctatccctcgccacttttaacagaagaaagtccctttgctctttacagccttgatttattgtttgacatggaccagcctttctatgatggtttgtcctttgttattttactcttccttggttggatcgtggttcggattataggtcgcattttggactttgtaacggaaatcaagttggattaccgggttgatagcattggcggtgccttgctgagcttttttgtccactatattggactcttcgttatattatttgtcctatccaccctgccctttgatttcatccagaaccagattgaatcatcttggctggctgagaccatgattaccaagactccggaattatcccaagactactatagccggtgggtggaagatgtggatccagatgcagaaacgtcctttgaccaagattaa

SEQ ID NO: 3110 - protein, 194 aa, Alloiococcus otitidis
MLFTLIILFIFIYSIYIGVKRGLILQLLMSIGFFISYGVAMALHENLSTYVEMLVPYPSPLLTEESPFALYSLDLLFDMDQPFYDGLSFVILLFLGWIVVRIIGRILDFVTEIKLDYRVDSIGGALLSFFVHYIGLFVILFVLSTLPFDFIQNQIESSWLAETMITKTPELSQDYYSRWVEDVDPDAETSFDQD

SEQ ID NO: 3111 - DNA, 603 bp, Alloiococcus otitidis; identical to SEQ ID NO: 3109
  CDS (7)..(600)

SEQ ID NO: 3112 - protein, 198 aa, Alloiococcus otitidis
MGVSMLFTLIILFIFIYSIYIGVKRGLILQLLMSIGFFISYGVAMALHENLSTYVEMLVPYPSPLLTEESPFALYSLDLLFDMDQPFYDGLSFVILLFLGWIVVRIIGRILDFVTEIKLDYRVDSIGGALLSFFVHYIGLFVILFVLSTLPFDFIQNQIESSWLAETMITKTPELSQDYYSRWVEDVDPDAETSFDQD

SEQ ID NO: 3113 - DNA, 2397 bp, Alloiococcus otitidis
  CDS (157)..(2394)
caaggagcgaaagctgtgaaaacaacccaagaaaaatccattgaagtcctcgactttcccaaagttaaacaggaattaagccagcacacccagtctgacctaggtaagaagatggccttggccctgaagccctcaacctcattggaggaaataaagatgctcttaaatcaaactggggatggggtcagcttgctacggatgaaaggcgggatcccggtcaccccttttgaatccatcctgcctcagttaaaacgcttgtcaatcggtggggggctaaacgggggagagattgcctccatcatgaaaattatcaaaaatgcaagagagatcaaaaactttttcagagaggcacaagaagacgatattgtcttagaaaatctctatgctgtaagcgacatgctaaatcctttatccgatttgtccaaaacgatccaggccgtggtagatgaggatggtcgggtagtggattcggctagtcccaagctaaaggggattcggaccggtatcaagcaagtggagcagtccatccggcaaaaattggagaacattacccgggggagcaagtcccgttacctaacagatgctattatcactatccggaatgaccgctatgtcgtaccagttaaggctgatagtaaaaatgtgtttgggggcattgtccatgaccagagtgcaacgggtcaaactttatttgtcgagccccagtctgtcttgaaccaaaacaataagttaaaggaatataccagccaagaaaaagcagaagttgaccgcttgctggctgatttgtcccaaaagatcaccccttacagtgaagacctagagcaagacttgcaagttctaacccttttagattttattgcagccaaggctaagtatagccggcaattgtctgctagccagccaatcgtggatgataaccgggaaatcgccctctatggggctcgtcaccctctgatagatccagaccaggtggtagaaaacgacataaccctaggcttggactacaaggccattgttgtgactggccccaatactggggggaaaacggttgtccttaaaaccctcggcctcttgcaaatcatgggtcagtccggcttgcacttgcctgttaaagataatagccggatcggggtttttgaaaaatgctatgccgatattggcgacgagcagtccattgaacaaagcttatcaactttctcctcccatatgaccaatatcgtttcgattttaagtgacatcgatgaagccactttgattgtcctagacgagttgggagcagggacagacccccaagaaggagcggccctggccattgccattttagactatatctcggcccgggggtcaacagtggtcattacttcccactaccctgaactcaaggcctatgcctacaaccggccagaaaccatcaatgccagcatggcctttgacgttaacagcttgaagccaacctataaattacttctaggcatcccagggcggtccaatgcctttgaagtagcccaacgcttaggcttaaataatgaaatcattgctgcttcaaaacaattgatgtcgggtgagagtcaaagtgtcaatcaaatgatcgaagacttagaagcaaaacgtcaagcctaccacaaaagaaaccagtccttgcaaaaagaactttatgatgctagcaagctccacaatgacttgaagaacttttatgaagcctaccaagaacggtctcaagaacttgaagacaaggccaaggacaaggccaatcgaatcgtagaaaaagcccaggaacaagctgaccaaattattgacgacttacggcaaaagcaactcaaccagcctagtgaggacaatattaaggaacatgaatttatcgatgccaagtctcggctgtccaatatgaagtatgaacaaaaacacctgaaacaaaataaggtcttgcagaaggaaaaagagaaaaaagccttggcggttggcgaccaggtccatgtcgattcctttgaccaggaggggactttggttgaccagaccggtgattcaaaatgggtggttcagatgggcatgttaaaaatgaagatcgatgaagaggacttaaccctcctagaaaaagggaaatccaagcaggcaaccaagcaagcaaactccctccgggcaaatgtaggatctgttaaaactgagatcgacttaagaggggagagggttgaccaggctgtacatcgcctggaccagtatattgaccaggccctcctcgccaattatggtaccgtaactgtgatccatggtatgggcacaggtgctgtccgcaaggcagttaaggactatttaagtaagcacaagcgggtccaatcttataacgacgccccagccaaccaaggagggaatggggctactatagtcaagtttaaacagtag

SEQ ID NO: 3114 - protein, 746 aa, Alloiococcus otitidis
MLLNQTGDGVSLLRMKGGIPVTPFESILPQLKRLSIGGGLNGGEIASIMKIIKNAREIKNFFREAQEDDIVLENLYAVSDMLNPLSDLSKTIQAVVDEDGRVVDSASPKLKGIRTGIKQVEQSIRQKLENITRGSKSRYLTDAIITIRNDRYVVPVKADSKNVFGGIVHDQSATGQTLFVEPQSVLNQNNKLKEYTSQEKAEVDRLLADLSQKITPYSEDLEQDLQVLTLLDFIAAKAKYSRQLSASQPIVDDNREIALYGARHPLIDPDQVVENDITLGLDYKAIVVTGPNTGGKTVVLKTLGLLQIMGQSGLHLPVKDNSRIGVFEKCYADIGDEQSIEQSLSTFSSHMTNIVSILSDIDEATLIVLDELGAGTDPQEGAALAIAILDYISARGSTVVITSHYPELKAYAYNRPETINASMAFDVNSLKPTYKLLLGIPGRSNAFEVAQRLGLNNEIIAASKQLMSGESQSVNQMIEDLEAKRQAYHKRNQSLQKELYDASKLHNDLKNFYEAYQERSQELEDKAKDKANRIVEKAQEQADQIIDDLRQKQLNQPSEDNIKEHEFIDAKSRLSNMKYEQKHLKQNKVLQKEKEKKALAVGDQVHVDSFDQEGTLVDQTGDSKWVVQMGMLKMKIDEEDLTLLEKGKSKQATKQANSLRANVGSVKTEIDLRGERVDQAVHRLDQYIDQALLANYGTVTVIHGMGTGAVRKAVKDYLSKHKRVQSYNDAPANQGGNGATIVKFKQ

SEQ ID NO: 3115 - DNA, 2397 bp, Alloiococcus otitidis; identical to SEQ ID NO: 3113
  CDS (112)..(2394)

SEQ ID NO: 3116 - protein, 761 aa, Alloiococcus otitidis
MALALKPSTSLEEIKMLLNQTGDGVSLLRMKGGIPVTPFESILPQLKRLSIGGGLNGGEIASIMKIIKNAREIKNFFREAQEDDIVLENLYAVSDMLNPLSDLSKTIQAVVDEDGRVVDSASPKLKGIRTGIKQVEQSIRQKLENITRGSKSRYLTDAIITIRNDRYVVPVKADSKNVFGGIVHDQSATGQTLFVEPQSVLNQNNKLKEYTSQEKAEVDRLLADLSQKITPYSEDLEQDLQVLTLLDFIAAKAKYSRQLSASQPIVDDNREIALYGARHPLIDPDQVVENDITLGLDYKAIVVTGPNTGGKTVVLKTLGLLQIMGQSGLHLPVKDNSRIGVFEKCYADIGDEQSIEQSLSTFSSHMTNIVSILSDIDEATLIVLDELGAGTDPQEGAALAIAILDYISARGSTVVITSHYPELKAYAYNRPETINASMAFDVNSLKPTYKLLLGIPGRSNAFEVAQRLGLNNEIIAASKQLMSGESQSVNQMIEDLEAKRQAYHKRNQSLQKELYDASKLHNDLKNFYEAYQERSQELEDKAKDKANRIVEKAQEQADQIIDDLRQKQLNQPSEDNIKEHEFIDAKSRLSNMKYEQKHLKQNKVLQKEKEKKALAVGDQVHVDSFDQEGTLVDQTGDSKWVVQMGMLKMKIDEEDLTLLEKGKSKQATKQANSLRANVGSVKTEIDLRGERVDQAVHRLDQYIDQALLANYGTVTVIHGMGTGAVRKAVKDYLSKHKRVQSYNDAPANQGGNGATIVKFKQ

SEQ ID NO: 3117 - DNA, 2397 bp, Alloiococcus otitidis; identical to SEQ ID NO: 3113
  CDS (16)..(2394)

SEQ ID NO: 3118 - protein, 793 aa, Alloiococcus otitidis
MKTTQEKSIEVLDFPKVKQELSQHTQSDLGKKMALALKPSTSLEEIKMLLNQTGDGVSLLRMKGGIPVTPFESILPQLKRLSIGGGLNGGEIASIMKIIKNAREIKNFFREAQEDDIVLENLYAVSDMLNPLSDLSKTIQAVVDEDGRVVDSASPKLKGIRTGIKQVEQSIRQKLENITRGSKSRYLTDAIITIRNDRYVVPVKADSKNVFGGIVHDQSATGQTLFVEPQSVLNQNNKLKEYTSQEKAEVDRLLADLSQKITPYSEDLEQDLQVLTLLDFIAAKAKYSRQLSASQPIVDDNREIALYGARHPLIDPDQVVENDITLGLDYKAIVVTGPNTGGKTVVLKTLGLLQIMGQSGLHLPVKDNSRIGVFEKCYADIGDEQSIEQSLSTFSSHMTNIVSILSDIDEATLIVLDELGAGTDPQEGAALAIAILDYISARGSTVVITSHYPELKAYAYNRPETINASMAFDVNSLKPTYKLLLGIPGRSNAFEVAQRLGLNNEIIAASKQLMSGESQSVNQMIEDLEAKRQAYHKRNQSLQKELYDASKLHNDLKNFYEAYQERSQELEDKAKDKANRIVEKAQEQADQIIDDLRQKQLNQPSEDNIKEHEFIDAKSRLSNMKYEQKHLKQNKVLQKEKEKKALAVGDQVHVDSFDQEGTLVDQTGDSKWVVQMGMLKMKIDEEDLTLLEKGKSKQATKQANSLRANVGSVKTEIDLRGERVDQAVHRLDQYIDQALLANYGTVTVIHGMGTGAVRKAVKDYLSKHKRVQSYNDAPANQGGNGATIVKFKQ

SEQ ID NO: 3119 - DNA, 348 bp, Alloiococcus otitidis
  CDS (61)..(345)
ccaactagtttgtcgacaacttccccgtcttttttaattaagagggtggggatactcataatgccaaattcttgggcggtattttggttttcatcgacatccactttaacaaattcaacgtcagacatttcttcttctaattcttcaatgacaggtgactgcatcttacaagggccacaccaagttgcccaaaaatcaactaatactaagcctgaatcggttgcttgtttaaaatcactatctgttactgctttaaccatgctaatcctccttaggcaaaaatattgccagttctcttacacttgtagtctatcacatgcttgtctttctttaaaggaaattgtttag

SEQ ID NO: 3120 - protein, 95 aa, Alloiococcus otitidis
MPNSWAVFWFSSTSTLTNSTSDISSSNSSMTGDCILQGPHQVAQKSTNTKPESVACLKSLSVTALTMLILLRQKYCQFSYTCSLSHACLSLKEIV

SEQ ID NO: 3121 - DNA, 348 bp, Alloiococcus otitidis; identical to SEQ ID NO: 3119
  CDS (46)..(345)

SEQ ID NO: 3122 - protein, 100 aa, Alloiococcus otitidis
MGILIMPNSWAVFWFSSTSTLTNSTSDISSSNSSMTGDCILQGPHQVAQKSTNTKPESVACLKSLSVTALTMLILLRQKYCQFSYTCSLSHACLSLKEIV

SEQ ID NO: 3123 - DNA, 348 bp, Alloiococcus otitidis; identical to SEQ ID NO: 3119
  CDS (10)..(345)

SEQ ID NO: 3124 - protein, 112 aa, Alloiococcus otitidis
MSTTSPSFLIKRVGILIMPNSWAVFWFSSTSTLTNSTSDISSSNSSMTGDCILQGPHQVAQKSTNTKPESVACLKSLSVTALTMLILLRQKYCQFSYTCSLSHACLSLKEIV

SEQ ID NO: 3125 - DNA, 345 bp, Alloiococcus otitidis
  CDS (37)..(342)
gagaactggcaatatttttgcctaaggaggattagcatggttaaagcagtaacagatagtgattttaaacaagcaaccgattcaggcttagtattagttgatttttgggcaacttggtgtggcccttgtaagatgcagtcacctgtcattgaagaattagaagaagaaatgtctgacgttgaatttgttaaagtggatgtcgatgaaaaccaaaataccgcccaagaatttggcattatgagtatccccaccctcttaattaaaaaagacggggaagttgtcgacaaactagttggctaccacagcaaggaccaactgatccaagttttggaagacctgaaataa

SEQ ID NO: 3126 - protein, 102 aa, Alloiococcus otitidis
MVKAVTDSDFKQATDSGLVLVDFWATWCGPCKMQSPVIEELEEEMSDVEFVKVDVDENQNTAQEFGIMSIPTLLIKKDGEVVDKLVGYHSKDQLIQVLEDLK

SEQ ID NO: 3127 - DNA, 1503 bp, Alloiococcus otitidis
  CDS (217)..(1500)
agcttgcagaagggcggaccagatgtggaagtagcgattatcggttttggggccagtggagtcaatgtttttaggcatttaattaacaaccaagacaagctggctttaacaaaaatatacattatacaagatccaaaaaatcaatttgcaagggggcttccatatagagaagatcatgagtccatgcgtttgaacactcaaccccatgctgtttccatggatgctgacaacaaagaagaatttactgactttttaaagacccagggaatttcctattcaccggaagattttttaccccggcctctttttggtcgctatttaaagcaactttaccaagaagtcttatccctaaaataccccatgatccgagttcaggttattaaccaagaggctataggagttaagatcactggccatggttacctagtggacctagcagacggccaaagcatccaggtccaatccatccagctctgtcttggccaccttgcctacaatgacccctaccatttaaaagggaaggaccggtacgtatacaatccctaccctattctggataagctaaagaatgttcagtcacatgaccggcttgccatcattggggcgggactgacagctttagacttatttgtttacttaaaaaactacaaaaaatcagaaaaaatcgacctgttttccttagaaggcttggccaagactcctagaggcttgaattaccagcatgacatccagctcaactttgcctctaaaagccacttggtccaacttgcccaagcccagggaggttttcttacagctgaggacctttttgcccaattgcggcaggaagctcttcatcatgggatagaagattttgactacctctggcatgaccatgaaagtgggactttggaatccctagccagttacttagaccaggtcgacaaattaaatattctccaaaccatcctgatcgcctttaaaacaggactcaacccagtctggaaccattgcatgacacgagaagaaagaagccggttttttgaattatacggcgaccgttttaatctttacctatctcccattccgcaaaaccgggcccgcgaacttgtcaaagctggtcaagagtcctatctatctgtttatagtgacatggaggctgtccagcttgacccagatgggaaattcattatccaggcccaggggagggaatatgcttcctatgactacttggttaatgcttgcggacaggccaccaatattgaagacaagcttgacatgcaagggcctctagtccagcaattagttcaagaaggcctagctcaaaccgatcctctgggggggttccattgtcattaccctagctttagcttggttcatccccaaagtgggcctttagctagttttaaggtctatggccagctagccagtggtattgacccttttaacaactccatagaaaagcttagttatagcacaaaaatgggagttgaagacctggttcggacctggtcagtttcctga

SEQ ID NO: 3128 - protein, 428 aa, Alloiococcus otitidis
MDADNKEEFTDFLKTQGISYSPEDFLPRPLFGRYLKQLYQEVLSLKYPMIRVQVINQEAIGVKITGHGYLVDLADGQSIQVQSIQLCLGHLAYNDPYHLKGKDRYVYNPYPILDKLKNVQSHDRLAIIGAGLTALDLFVYLKNYKKSEKIDLFSLEGLAKTPRGLNYQHDIQLNFASKSHLVQLAQAQGGFLTAEDLFAQLRQEALHHGIEDFDYLWHDHESGTLESLASYLDQVDKLNILQTILIAFKTGLNPVWNHCMTREERSRFFELYGDRFNLYLSPIPQNRARELVKAGQESYLSVYSDMEAVQLDPDGKFIIQAQGREYASYDYLVNACGQATNIEDKLDMQGPLVQQLVQEGLAQTDPLGGFHCHYPSFSLVHPQSGPLASFKVYGQLASGIDPFNNSIEKLSYSTKMGVEDLVRTWSVS

SEQ ID NO: 3129 - DNA, 1503 bp, Alloiococcus otitidis; identical to SEQ ID NO: 3127
  CDS (184)..(1500)

SEQ ID NO: 3130 - protein, 439 aa, Alloiococcus otitidis
MRLNTQPHAVSMDADNKEEFTDFLKTQGISYSPEDFLPRPLFGRYLKQLYQEVLSLKYPMIRVQVINQEAIGVKITGHGYLVDLADGQSIQVQSIQLCLGHLAYNDPYHLKGKDRYVYNPYPILDKLKNVQSHDRLAIIGAGLTALDLFVYLKNYKKSEKIDLFSLEGLAKTPRGLNYQHDIQLNFASKSHLVQLAQAQGGFLTAEDLFAQLRQEALHHGIEDFDYLWHDHESGTLESLASYLDQVDKLNILQTILIAFKTGLNPVWNHCMTREERSRFFELYGDRFNLYLSPIPQNRARELVKAGQESYLSVYSDMEAVQLDPDGKFIIQAQGREYASYDYLVNACGQATNIEDKLDMQGPLVQQLVQEGLAQTDPLGGFHCHYPSFSLVHPQSGPLASFKVYGQLASGIDPFNNSIEKLSYSTKMGVEDLVRTWSVS

SEQ ID NO: 3131 - DNA, 1503 bp, Alloiococcus otitidis; identical to SEQ ID NO: 3127
  CDS (25)..(1500)

SEQ ID NO: 3132 - protein, 492 aa, Alloiococcus otitidis
MEVAIIGFGASGVNVFRHLINNQDKLALTKIYIIQDPKNQFARGLPYREDHESMRLNTQPHAVSMDADNKEEFTDFLKTQGISYSPEDFLPRPLFGRYLKQLYQEVLSLKYPMIRVQVINQEAIGVKITGHGYLVDLADGQSIQVQSIQLCLGHLAYNDPYHLKGKDRYVYNPYPILDKLKNVQSHDRLAIIGAGLTALDLFVYLKNYKKSEKIDLFSLEGLAKTPRGLNYQHDIQLNFASKSHLVQLAQAQGGFLTAEDLFAQLRQEALHHGIEDFDYLWHDHESGTLESLASYLDQVDKLNILQTILIAFKTGLNPVWNHCMTREERSRFFELYGDRFNLYLSPIPQNRARELVKAGQESYLSVYSDMEAVQLDPDGKFIIQAQGREYASYDYLVNACGQATNIEDKLDMQGPLVQQLVQEGLAQTDPLGGFHCHYPSFSLVHPQSGPLASFKVYGQLASGIDPFNNSIEKLSYSTKMGVEDLVRTWSVS

SEQ ID NO: 3133 - DNA, 1503 bp, Alloiococcus otitidis; identical to SEQ ID NO: 3127
  CDS (4)..(1500)

SEQ ID NO: 3134 - protein, 499 aa, Alloiococcus otitidis
MQKGGPDVEVAIIGFGASGVNVFRHLINNQDKLALTKIYIIQDPKNQFARGLPYREDHESMRLNTQPHAVSMDADNKEEFTDFLKTQGISYSPEDFLPRPLFGRYLKQLYQEVLSLKYPMIRVQVINQEAIGVKITGHGYLVDLADGQSIQVQSIQLCLGHLAYNDPYHLKGKDRYVYNPYPILDKLKNVQSHDRLAIIGAGLTALDLFVYLKNYKKSEKIDLFSLEGLAKTPRGLNYQHDIQLNFASKSHLVQLAQAQGGFLTAEDLFAQLRQEALHHGIEDFDYLWHDHESGTLESLASYLDQVDKLNILQTILIAFKTGLNPVWNHCMTREERSRFFELYGDRFNLYLSPIPQNRARELVKAGQESYLSVYSDMEAVQLDPDGKFIIQAQGREYASYDYLVNACGQATNIEDKLDMQGPLVQQLVQEGLAQTDPLGGFHCHYPSFSLVHPQSGPLASFKVYGQLASGIDPFNNSIEKLSYSTKMGVEDLVRTWSVS

SEQ ID NO: 3135 - DNA, 843 bp, Alloiococcus otitidis
  CDS (7)..(840)
aggaacatgattatgtatactgatgggattggctttattgattcaggagtgggtggcttcaccctggtcaaagaagccatgaagcaattgccaaatgaacaattttactatctgggagacaccgcccggtcaccttatggacctaaagacatggccactgtcaaggcatatgcctttgaacttgccaattacctggttaaaaaccaccagatcaaaatcttggtgatcgcttgtaatactgcgactgtcgctgccctcaaggacctaaaacaggccttgcccatcccagttttaggggtcatcttacctggttgccgagcagctattaaggctagtgttaaccatcagattggggttattgccacccatgggaccatccagtccggtcgctatgagcttgaacttaaacggaaacgaccggatattgaagtgacaagtctggcttgtcccgaatttgcccccatggtagaggcgggagactaccgatctgttcaagctagcagtgtggtgaggacatccttacaggccctagaagaccaagatttggatacccttattttgggttgcacccactatcccattataaaagacctcattcaagactctattggccctggtatcagcttggttgatccaggggcggaagctgtgaatgacttgagtgtcttattagactattatgacttgactaatgaccggtttaatcccaacctgacccaccatttttacaccacgggagataaagccgggtttaagaaaatcgcggatgactggcttgaccaccacaactaccgggttgaccatttagatttagaggagttgcaagaagttaatggaagataa

SEQ ID NO: 3136 - protein, 278 aa, Alloiococcus otitidis
MIMYTDGIGFIDSGVGGFTLVKEAMKQLPNEQFYYLGDTARSPYGPKDMATVKAYAFELANYLVKNHQIKILVIACNTATVAALKDLKQALPIPVLGVILPGCRAAIKASVNHQIGVIATHGTIQSGRYELELKRKRPDIEVTSLACPEFAPMVEAGDYRSVQASSVVRTSLQALEDQDLDTLILGCTHYPIIKDLIQDSIGPGISLVDPGAEAVNDLSVLLDYYDLTNDRFNPNLTHHFYTTGDKAGFKKIADDWLDHHNYRVDHLDLEELQEVNGR

SEQ ID NO: 3137 - DNA, 633 bp, Alloiococcus otitidis
  CDS (19)..(630)
aggagttgcaagaagttaatggaagataaagtgttgattattgccactgggaaccctggcaaggcagaggaatttaaggacctttttgccgaaagaggctaccagatcaaaaccctagccgactatcctgaccttgaagaagtggaagaaactggccaaagctttgaagaaaatgcccggctcaaggctgagaccatcgcccgccaggtcaatcaagtggttattgcggatgattctggcttgaaagtggatgaccttggggggatgccggggatctattctgcccgctatgcaggggaagacaagaacgatgcccgaaacaatgccaaattattggccgacttgggggaaatacaaaatgctaaacggtcagcccacttccactgcaccctagtcgctgcctacccaggttgggacagtttggtagtggaaggcgagctggccggtcaaattgctgacatgcctcgtggcgacaatggcttcggctatgaccccttgttttacttagaagattatggcaagacccttgcccaacttgacccaaaagaaaaaaacaaaatcagccaccgagcacaggccctaaaagcattagaccgggtctttgaccagtggctccaggaagaaggaaagtaa

SEQ ID NO: 3138 - protein, 204 aa, Alloiococcus otitidis
MEDKVLIIATGNPGKAEEFKDLFAERGYQIKTLADYPDLEEVEETGQSFEENARLKAETIARQVNQVVIADDSGLKVDDLGGMPGIYSARYAGEDKNDARNNAKLLADLGEIQNAKRSAHFHCTLVAAYPGWDSLVVEGELAGQIADMPRGDNGFGYDPLFYLEDYGKTLAQLDPKEKNKISHRAQALKALDRVFDQWLQEEGK

SEQ ID NO: 3139 - DNA, 510 bp, Alloiococcus otitidis
  CDS (46)..(507)
gtgaagattttagcgattagtgacaaccatggtgacgaaacaattttggaacaagtcctctccatccacgagactgaagtggactcttttattcattgtggcgattcggagttgagtgatgtccaccccctatggcagcagtattcggtcgtcaagggcaatactgattttggccaagatttaaaagacggtcaggtagacaaggtggatgggcgttgcttctttattacccatggccacttgtatgacgttaaacggtcacgtaaaactttggctaaggcggctaaggaggcaggggcccaatttgctttttacggacatacccatattcccaaagttgaaaccattgaaggtgtccatgtcatcaacccaggtagcatcagcctacctaagggcgaatttccccatgggacttactgtattttagatattaaggatgaccagaccagtgtaacctattataccagggaccaccagccggttccggaattatcccaaaccctagcctaa

SEQ ID NO: 3140 - protein, 154 aa, Alloiococcus otitidis
MEQVLSIHETEVDSFIHCGDSELSDVHPLWQQYSVVKGNTDFGQDLKDGQVDKVDGRCFFITHGHLYDVKRSRKTLAKAAKEAGAQFAFYGHTHIPKVETIEGVHVINPGSISLPKGEFPHGTYCILDIKDDQTSVTYYTRDHQPVPELSQTLA

SEQ ID NO: 3141 - DNA, 510 bp, Alloiococcus otitidis; identical to SEQ ID NO: 3139
  CDS (1)..(507)

SEQ ID NO: 3142 - protein, 169 aa, Alloiococcus otitidis
MKILAISDNHGDETILEQVLSIHETEVDSFIHCGDSELSDVHPLWQQYSVVKGNTDFGQDLKDGQVDKVDGRCFFITHGHLYDVKRSRKTLAKAAKEAGAQFAFYGHTHIPKVETIEGVHVINPGSISLPKGEFPHGTYCILDIKDDQTSVTYYTRDHQPVPELSQTLA

SEQ ID NO: 3143 - DNA, 483 bp, Alloiococcus otitidis
  CDS (16)..(480)
ataaggagatactttatgatcaatgacaaaatccaagcctattttgtgaatgaaaaataccccttaatcaaggatggcgatgaggtggctgtgatccattcctggcacaagcttgaccacgccatgttaattttgacttctgatacctataacgtggttcctgtcctgaataagtcttcccaggtagtggggctgatctccatgtcacgtatcgtgaaggcggttgtttcaggagccgatttctcttttggagatcttgaccagtacactgttcaagaggttatggaccaggactttgacaaactggttttgggggaatttgacttggaagatgtcctccagcaactggtgtcgacttcctttttatgtgtggtcgatgaccaaggaatttttaaggggattatcacccgaagcaccatcttgcaaggaattaatcggcttgtccatgccattgaccaggactttgacttaagggacaagtaa

SEQ ID NO: 3144 - protein, 155 aa, Alloiococcus otitidis
MINDKIQAYFVNEKYPLIKDGDEVAVIHSWHKLDHAMLILTSDTYNVVPVLNKSSQVVGLISMSRIVKAVVSGADFSFGDLDQYTVQEVMDQDFDKLVLGEFDLEDVLQQLVSTSFLCVVDDQGIFKGIITRSTILQGINRLVHAIDQDFDLRDK

SEQ ID NO: 3145 - DNA, 996 bp, Alloiococcus otitidis
  CDS (391)..(993)
ctaatattttacaaatgtaacctgctttcaaggaaaattttaaaggtattcctttttaactgcttctattatataatagtaagcggtgatgtgaaaatgaaatttacacttttagccgaaagtgaaatattggaagagaccacagagcggaccaactttgtgattgaatacttccaaaacttaaactggcaagaaattgctttagccctcctacttatttttctccaaattttatttgctgtgatcgtcttcggtattgtcaaatggcttgggactaagttgattagccggtcctttgcgggaagcagctttgccaaaggccagtctcctagccggcggaagaccctcaaacgcctggccaactcggtcttcaacggcgttatcctgttcttgtttgtctttactgtcttagagatactgggtgtccctattggctccctcctagccggggctggggtcattggtttggccttgtcactgggggcccaagactttgtctcagacctggtgaacggcctagttatcctctttgaaaaacaaatcgatattggagacaaggtaatcataaatgatatcttaggttttgtggaagatacgaacctaaaaacaacggtcgtcaaagacttagatggagcttttcactatatccccaaccggaaaattgatatcatcagtaaccactcccgggacaacatgcgggccatgattattatccgcctctttgccaatagtgatttcgaaaccatagaccgggttgttagagaaaccacatataaaaaaatggaagactataccacccttgtcagccaaccagaatttatctatgaggccgccgaaaacggacaagtaaccctgagaattcctatctttactgtccctggcgaagaatatgatgtcatggttgagttctatgaagccctgctgaaggccttaaacaaagctggtattgaacttccttccaatacgattgatatcccgagtccagaccaaaattaa

SEQ ID NO: 3146 - protein, 201 aa, Alloiococcus otitidis
MFVFTVLEILGVPIGSLLAGAGVIGLALSLGAQDFVSDLVNGLVILFEKQIDIGDKVIINDILGFVEDTNLKTTVVKDLDGAFHYIPNRKIDIISNHSRDNMRAMIIIRLFANSDFETIDRVVRETTYKKMEDYTTLVSQPEFIYEAAENGQVTLRIPIFTVPGEEYDVMVEFYEALLKALNKAGIELPSNTIDIPSPDQN

SEQ ID NO: 3147 - DNA, 996 bp, Alloiococcus otitidis; identical to SEQ ID NO: 3145
  CDS (97)..(993)

SEQ ID NO: 3148 - protein, 299 aa, Alloiococcus otitidis
MKFTLLAESEILEETTERTNFVIEYFQNLNWQEIALALLLIFLQILFAVIVFGIVKWLGTKLISRSFAGSSFAKGQSPSRRKTLKRLANSVFNGVILFLFVFTVLEILGVPIGSLLAGAGVIGLALSLGAQDFVSDLVNGLVILFEKQIDIGDKVIINDILGFVEDTNLKTTVVKDLDGAFHYIPNRKIDIISNHSRDNMRAMIIIRLFANSDFETIDRVVRETTYKKMEDYTTLVSQPEFIYEAAENGQVTLRIPIFTVPGEEYDVMVEFYEALLKALNKAGIELPSNTIDIPSPDQN

SEQ ID NO: 3149 - DNA, 996 bp, Alloiococcus otitidis; identical to SEQ ID NO: 3145
  CDS (91)..(993)

SEQ ID NO: 3150 - protein, 301 aa, Alloiococcus otitidis
MKMKFTLLAESEILEETTERTNFVIEYFQNLNWQEIALALLLIFLQILFAVIVFGIVKWLGTKLISRSFAGSSFAKGQSPSRRKTLKRLANSVFNGVILFLFVFTVLEILGVPIGSLLAGAGVIGLALSLGAQDFVSDLVNGLVILFEKQIDIGDKVIINDILGFVEDTNLKTTVVKDLDGAFHYIPNRKIDIISNHSRDNMRAMIIIRLFANSDFETIDRVVRETTYKKMEDYTTLVSQPEFIYEAAENGQVTLRIPIFTVPGEEYDVMVEFYEALLKALNKAGIELPSNTIDIPSPDQN

SEQ ID NO: 3151 - DNA, 570 bp, Alloiococcus otitidis
  CDS (73)..(567)
aaagctccatctaagtctttgacgaccgttgtttttaggttcgtatcttccacaaaacctaagatatcatttatgattaccttgtctccaatatcgatttgtttttcaaagaggataactaggccgttcaccaggtctgagacaaagtcttgggcccccagtgacaaggccaaaccaatgaccccagccccggctaggagggagccaatagggacacccagtatctctaagacagtaaagacaaacaagaacaggataacgccgttgaagaccgagttggccaggcgtttgagggtcttccgccggctaggagactggcctttggcaaagctgcttcccgcaaaggaccggctaatcaacttagtcccaagccatttgacaataccgaagacgatcacagcaaataaaatttggagaaaaataagtaggagggctaaagcaatttcttgccagtttaagttttggaagtattcaatcacaaagttggtccgctctgtggtctcttccaatatttcactttcggctaaaagtgtaaatttcattttcacatcaccgcttactattatataa

SEQ ID NO: 3152 - protein, 165 aa, Alloiococcus otitidis
MITLSPISICFSKRITRPFTRSETKSWAPSDKAKPMTPAPARREPIGTPSISKTVKTNKNRITPLKTELARRLRVFRRLGDWPLAKLLPAKDRLINLVPSHLTIPKTITANKIWRKISRRAKAISCQFKFWKYSITKLVRSVVSSNISLSAKSVNFIFTSPLTII

SEQ ID NO: 3153 - DNA, 570 bp, Alloiococcus otitidis; identical to SEQ ID NO: 3151
  CDS (19)..(567)

SEQ ID NO: 3154 - protein, 183 aa, Alloiococcus otitidis
MTTVVFRFVSSTKPKISFMITLSPISICFSKRITRPFTRSETKSWAPSDKAKPMTPAPARREPIGTPSISKTVKTNKNRITPLKTELARRLRVFRRLGDWPLAKLLPAKDRLINLVPSHLTIPKTITANKIWRKISRRAKAISCQFKFWKYSITKLVRSVVSSNISLSAKSVNFIFTSPLTII

SEQ ID NO: 3155 - DNA, 375 bp, Alloiococcus otitidis
  CDS (16)..(372)
aaagaaggaataagaatgaacatgacagggtctgagcttgcagctttaatcgcggccattgcctttgctatcttagccattgcacttatttacttaatttttaaaattgctggcgttgtttctgatcttaacaatacagtagatgaagtgaataatagtttgaatgttattaccaaggatgctgaccacttgctcattgaaattgaagggttgttgaacaaaaccaacattactttagatgatgtcaatggcaaactaggcttgaccacccctctctttaaagcagtgggtgacttaggtgagtcggtttccaagttaaatgaatcgactgtccgcctcactgaaaaagtggctggcacggctggcaaaaaatag

SEQ ID NO: 3156 - protein, 119 aa, Alloiococcus otitidis
MNMTGSELAALIAAIAFAILAIALIYLIFKIAGVVSDLNNTVDEVNNSLNVITKDADHLLIEIEGLLNKTNITLDDVNGKLGLTTPLFKAVGDLGESVSKLNESTVRLTEKVAGTAGKK

SEQ ID NO: 3157 - DNA, 480 bp, Alloiococcus otitidis
  CDS (34)..(477)
atagttcaatcaataaaaaaggagcgatcgtctatgagtgatagagatagagcagaaggatttttaattggcactttagtcggtggactagtggcagggatatctgccctcttgtttgcacctaaatcaggtgaagccctccggaaagacattgcagaccaagctgacgaatggaagaatcaagccagtgactatgccagcgatgttaagcaaaaaggtcaagaattgtactctgaagcccgtcaaaccggtgaagacctggctaacactgccaaacaagcaggcaaccgctaccgggacaatgctgagctggctttgaacaaggctaaagcagaccttaaatccaatatcagtgatgatgacgttgatgtggacgaattgcttgactcccttcaagagacagctgaccaaaccttggatcgagacaaagacatcactgaagacatcatcaaacaagcaaaaaaagatgttgaatcctaa

SEQ ID NO: 3158 - protein, 148 aa, Alloiococcus otitidis
MSDRDRAEGFLIGTLVGGLVAGISALLFAPKSGEALRKDIADQADEWKNQASDYASDVKQKGQELYSEARQTGEDLANTAKQAGNRYRDNAELALNKAKADLKSNISDDDVDVDELLDSLQETADQTLDRDKDITEDIIKQAKKDVES

SEQ ID NO: 3159 - DNA, 1134 bp, Alloiococcus otitidis
  CDS (25)..(1131)
catgctttaggaagttggttcaatatgacaagtttagataagttacaagctcagttaaaagaccaggacattgaccttgccctcatcacccggcctcaactcatcgattatttcactggctatgctagcgaacccatggaaagaatcttggccttatttgtttcgccgaccaagcatatcttatttgctccctacctggatgcccaggatgcaaaagaccaggtctcctgcccggtcttatcttataaagatgaagaagacccctggcaggttatccaaaaagacctgctcagccaatttgacagccccaaccgggtgggagtagaagacagccagctcaccctagacaagtacaaggccttaagtggaatcttaagggacagtgaatttattgacatcggtagtttgttggatggcttgaaattaatcaaaagcaaggaagaaaaagaccgcttgcttgaagcgggagacttagctgacaaggccctacaagtaggcttaaatgccttaaaagtagggatcagcgaggttgaagtggtagccaaaattgactacgaaatgaaaaaattaggggtgtctaaaatgagtttcccaaccatggtcttgtttggtgaccatgctggtagccctcacggcgtgccaggtagtcggaaactccaggcaggtgaatttgtcctcttcgacctaggcgttctctaccagggttatgccagtgacatgtctcggaccgtcttctttggagagcctgaagacttagatgaccaagacaaggcagtctaccaaacagtcttaaaggctcaagaaactgccatggaagcggcaaaaccaggcatgacagctggcgacttagacaagttggcccggcaagtaatcgaccaagccggctatggccagtacttcatccaccgattgggtcatggcatcggccaaaccgcccatgagtccccaagtattagttcatcgaatactagtaacttgcaggcaggaatggccttttcgattgaaccaggcatctatatccctggccaggttggagtccgaattgaagattgtgtctatctgaatgaagacggagccataagtctgacacaatcccccaaaaaccttcagtttttacctgccgtgactgactaa

SEQ ID NO: 3160 - protein, 369 aa, Alloiococcus otitidis
MTSLDKLQAQLKDQDIDLALITRPQLIDYFTGYASEPMERILALFVSPTKHILFAPYLDAQDAKDQVSCPVLSYKDEEDPWQVIQKDLLSQFDSPNRVGVEDSQLTLDKYKALSGILRDSEFIDIGSLLDGLKLIKSKEEKDRLLEAGDLADKALQVGLNALKVGISEVEVVAKIDYEMKKLGVSKMSFPTMVLFGDHAGSPHGVPGSRKLQAGEFVLFDLGVLYQGYASDMSRTVFFGEPEDLDDQDKAVYQTVLKAQETAMEAAKPGMTAGDLDKLARQVIDQAGYGQYFIHRLGHGIGQTAHESPSISSSNTSNLQAGMAFSIEPGIYIPGQVGVRIEDCVYLNEDGAISLTQSPKNLQFLPAVTD

SEQ ID NO: 3161 - DNA, 1002 bp, Alloiococcus otitidis
  CDS (1)..(999)
atggatcgacaaacagttacaatttatgatgtagccagggaggctggtgtttccattgctacagtctcacgggtggtcaacggcaatcccaatgtcaaaccttccacccgcaaaaaagttgaagaagtcattaaacagctgaattaccaacccaacgctgtagcaagaggtttggctagtaagaaaacaaccactgttggggttattattccagatgttaccaacctttattactcttccttggctcgggggatcgatgatgttgcttccatctacaagtacaatattatcctaaccaataccgatgagaacttggaaaaagaaatccttgtcttaaaagatttgttgaccaagcaggtagatggtgttatttatatgggtcaccatatttcagatgaattacatgcccaattagaaagtgtgccaacccctttggtcttagctgggtcaattgaccaaaaagggatccttcccagtgtaaatattgactacggtgcagccatgaaagatagcttggacattttatttgaaaatggcaatgaaaaaataggctttgtttaccggtccgtcgacgaagaaattgactcccaggtccggtacggggcctataaggaagcccaccaagatcatggtctcccagtggatgataatttagtctttacttcatcaaattcatataaagacggtcaaaatatttatgaccagcttatatccaatggggcgaccgctgccattttctcagatgatgaagcagctgttggtttcttaaatgctgctcatgacaatggcttgcaggtcccagaaaaatttgaaattattgtctccaataattccaaacttgttaatatgacccggccccagctcagtactgtccttcaacccttatatgacatcggggcagtttctatgcgcttgctgaccaagatgatgaacaatgatgaagttgaggataaggaaattgtcctcccccacaccattaaaaaatggggcactaccaaatag

SEQ ID NO: 3162 - protein, 333 aa, Alloiococcus otitidis
MDRQTVTIYDVAREAGVSIATVSRVVNGNPNVKPSTRKKVEEVIKQLNYQPNAVARGLASKKTTTVGVIIPDVTNLYYSSLARGIDDVASIYKYNIILTNTDENLEKEILVLKDLLTKQVDGVIYMGHHISDELHAQLESVPTPLVLAGSIDQKGILPSVNIDYGAAMKDSLDILFENGNEKIGFVYRSVDEEIDSQVRYGAYKEAHQDHGLPVDDNLVFTSSNSYKDGQNIYDQLISNGATAAIFSDDEAAVGFLNAAHDNGLQVPEKFEIIVSNNSKLVNMTRPQLSTVLQPLYDIGAVSMRLLTKMMNNDEVEDKEIVLPHTIKKWGTTK

SEQ ID NO: 3163 - DNA, 2640 bp, Alloiococcus otitidis
  CDS (106)..(2637)
gttaatacccttaaggagttaaatatgaagtcaaataattggaagcataccctccgaaactggctagagaacatatactattattttgatatttttgccagagtaatgaaaagcttactaggtgtttttattttcttatttgtcgtagctggggccctagctggcggtttggctgctggctactttgcttccctagtggatggggatatcccctcccaggaagtcatggctgaggaagtaacccagtactcgatcacctcaacagcccattatgcagacggtagcctgattagtgaattgcggtctgacctagtccgaaccccaaccaccattgacaaggtctcaccagagtttatcgatgccttggtagcagttgaagatgaatacttcttggaacacgaaggaatcgtaccgaaggcgattgtccgggctatgttacaagaatttaccggtagcgaaagccagactgggggctctaccctcacccaacaagtcatcaagcaacagctcctctctaatgaagccacccacaagcggaaggttaacgagattcttttggccctccgacttgaaaacttcatggacaaagagcaaatattagaagcttacattaatgtgtccccttttggacggaataaccgggggcaaaatattgccggtatccaagaagcaactgaagggatctttggcattcaaccagacgaactcaacctgccccaagctgcctttattgctggcttaccgcaaagccccatcgcctactccccttacaaccaagatgggtctatcaaagaagacctctcccgtggtttagcccggaaggatatcgtcttgtttaacatgtaccgggaagactacatcactttagaagaatttgaagaagctagagactatgacttagaaccagacttcatcccacgacaagaagatgaagacgggtctgaacgccagttttatgtttatgatttggccgaaaaagaagcccgggatattatcatcaaccagattattgaaaccagtgactacagtcctgaagaggtccaggaagataatgaactagctgaagaaatttataaccaggccgacaccatgatgcggtctcaggggatcaagatttatacaactattgacaaagacctccacaccgccattaaccaggctgcccaagaccaaatcgatagcttaggtagtgagaaaaccatcacctacaccaattccgacggcgaaaccgtaaccgaaagctttccgatccaattaggggctactgtcattgaaaacgagacgggccgggtcctagccttcgtcggtggacgggattatgactactctaattacaatattccctttgattctagacggtcatccgggtcaaccctaaaacccctcgtggcttatggtccggccttggctgaacacattattaccccgcaaaccgttatcccagacactcctttctcagttccaagtggtggcggaacccacgctatttccaactacggagaaacaaccaaccaatggcgtcctgctgaggactggctaccaaaatcgcaaaatattccagcctctagagtctttatggaacttttagaaaacgacatcgatgtggaacaatacgtccgtcgcctaggcttaggccaagacgccatcagtagcgacgaattcaacaacccatccctagctttaggtggggtcacccatggacctactgttaccgaactaacagctgcttatgccgccttggcaaacaatggagtttttaacccaccccacgttatcgaccgaatcgaggatgccaatggtaacgtgctttatgaaacaagcgaaaataatgaaccaagccgggtttggtccgaagccagcaactacctactcgttgacatgctgagaggagttacccactctgatatcgggactggtagtgaaattcctggcaacctacaattcgatgccgacctcctctccaagtcgggaacttctagtgaatacaaggacgtatggtttgttggctctactccaaacgtttcccttggtacttggttaggttatgacaaccaaaatatttcagtagaatatgactatggggtccacccaagtgtccggactcgacgtctatgggccaacctgctcaacactatctaccaaactaatgccgacctcattggtttgggcgaggaattctacatgccagaagataaattaaccactgaaaccatctcgacccaaaccggtatgaaaactggtcgggttgaattgccagatggtaaagtagtcaacctcggcgggcctacgactgaagccttgtttgatgctgagaatgttcctgggacaactgtttatgacttcaccgtccaagcgacttcctccgaattggataatttctggagtggtcgggccaatcgaaacacccgcggttcttccagtaacacaaacggctcatcaagtggctcttcctcgggtggcagcgatggacaggaagacactgatgacgaccaggaagatggtcaagaccaagcaggtgaagaagaaaatgctggcaacgaccaggacgatgacgcctcttctatcgaaagcaccttacgaaactttatcgattccatcattggtggcaatgacgaccaagatgaggacgacgaagaataa

SEQ ID NO: 3164 - protein, 844 aa, Alloiococcus otitidis
MKSLLGVFIFLFVVAGALAGGLAAGYFASLVDGDIPSQEVMAEEVTQYSITSTAHYADGSLISELRSDLVRTPTTIDKVSPEFIDALVAVEDEYFLEHEGIVPKAIVRAMLQEFTGSESQTGGSTLTQQVIKQQLLSNEATHKRKVNEILLALRLENFMDKEQILEAYINVSPFGRNNRGQNIAGIQEATEGIFGIQPDELNLPQAAFIAGLPQSPIAYSPYNQDGSIKEDLSRGLARKDIVLFNMYREDYITLEEFEEARDYDLEPDFIPRQEDEDGSERQFYVYDLAEKEARDIIINQIIETSDYSPEEVQEDNELAEEIYNQADTMMRSQGIKIYTTIDKDLHTAINQAAQDQIDSLGSEKTITYTNSDGETVTESFPIQLGATVIENETGRVLAFVGGRDYDYSNYNIPFDSRRSSGSTLKPLVAYGPALAEHIITPQTVIPDTPFSVPSGGGTHAISNYGETTNQWRPAEDWLPKSQNIPASRVFMELLENDIDVEQYVRRLGLGQDAISSDEFNNPSLALGGVTHGPTVTELTAAYAALANNGVFNPPHVIDRIEDANGNVLYETSENNEPSRVWSEASNYLLVDMLRGVTHSDIGTGSEIPGNLQFDADLLSKSGTSSEYKDVWFVGSTPNVSLGTWLGYDNQNISVEYDYGVHPSVRTRRLWANLLNTIYQTNADLIGLGEEFYMPEDKLTTETISTQTGMKTGRVELPDGKVVNLGGPTTEALFDAENVPGTTVYDFTVQATSSELDNFWSGRANRNTRGSSSNTNGSSSGSSSGGSDGQEDTDDDQEDGQDQAGEEENAGNDQDDDASSIESTLRNFIDSIIGGNDDQDEDDEE

SEQ ID NO: 3165 - DNA, 2640 bp, Alloiococcus otitidis; identical to SEQ ID NO: 3163
  CDS (25)..(2637)

SEQ ID NO: 3166 - protein, 871 aa, Alloiococcus otitidis
MKSNNWKHTLRNWLENIYYYFDIFARVMKSLLGVFIFLFVVAGALAGGLAAGYFASLVDGDIPSQEVMAEEVTQYSITSTAHYADGSLISELRSDLVRTPTTIDKVSPEFIDALVAVEDEYFLEHEGIVPKAIVRAMLQEFTGSESQTGGSTLTQQVIKQQLLSNEATHKRKVNEILLALRLENFMDKEQILEAYINVSPFGRNNRGQNIAGIQEATEGIFGIQPDELNLPQAAFIAGLPQSPIAYSPYNQDGSIKEDLSRGLARKDIVLFNMYREDYITLEEFEEARDYDLEPDFIPRQEDEDGSERQFYVYDLAEKEARDIIINQIIETSDYSPEEVQEDNELAEEIYNQADTMMRSQGIKIYTTIDKDLHTAINQAAQDQIDSLGSEKTITYTNSDGETVTESFPIQLGATVIENETGRVLAFVGGRDYDYSNYNIPFDSRRSSGSTLKPLVAYGPALAEHIITPQTVIPDTPFSVPSGGGTHAISNYGETTNQWRPAEDWLPKSQNIPASRVFMELLENDIDVEQYVRRLGLGQDAISSDEFNNPSLALGGVTHGPTVTELTAAYAALANNGVFNPPHVIDRIEDANGNVLYETSENNEPSRVWSEASNYLLVDMLRGVTHSDIGTGSEIPGNLQFDADLLSKSGTSSEYKDVWFVGSTPNVSLGTWLGYDNQNISVEYDYGVHPSVRTRRLWANLLNTIYQTNADLIGLGEEFYMPEDKLTTETISTQTGMKTGRVELPDGKVVNLGGPTTEALFDAENVPGTTVYDFTVQATSSELDNFWSGRANRNTRGSSSNTNGSSSGSSSGGSDGQEDTDDDQEDGQDQAGEEENAGNDQDDDASSIESTLRNFIDSIIGGNDDQDEDDEE

SEQ ID NO: 3167 - DNA, 306 bp, Alloiococcus otitidis
  CDS (7)..(303)
gtggtaatgaaggcacgctcccctaaggtgttgtatttgcgattggctgttgaagagagaccggcatcggtacagacgacaaattttgataagcgaaaatccttaaggattcttttctctaaaggtttcagggtggtttgttcattggtgttgccgcttgtgatattaaaagcaagtggaatgcccgagccgtccataaataatcccatttgcacaatagggttcggccgattttccttggaatgcccgtattgtttcaggccttcggcttcttcgatttcaaagaaaaaattggtgcagtcatag

SEQ ID NO: 3168 - protein, 99 aa, Alloiococcus otitidis
MKARSPKVLYLRLAVEERPASVQTTNFDKRKSLRILFSKGFRVVCSLVLPLVILKASGMPEPSINNPICTIGFGRFSLECPYCFRPSASSISKKKLVQS

SEQ ID NO: 3169 - DNA, 1401 bp, Alloiococcus otitidis
  CDS (145)..(1398)
tcagctttgcgtatcaaaaaaagtcgttcaaaaaattcggtttcttatgccgttattaaagatattactcgtaacggtaagcgcaccactaaaattgtcgaaacactgggcaatcacgaagaaatcaaacaaaaacatcccgaaatggatccagaagaatgggccaaacagcgagccgccgaattaacggaacaggaaaaacagaaaaagcaaaagatcgccattcactacgatccaaccaagaaaataaaaaaagataaacaacaactttttaatgttggttacctctttttacaatccattttagctcagttgaaactccccaccatgacgaaaaaaatcgccaagcagcatcaatttaaatatccgttggatcaaattttatcttgtctcatttacaatcggattttgagtccggcctccaaaaaaagtgcctttgaatttgcccaaaccctattagaaccgcctcaatttcagttacaagatatttaccgcagtcttgatgtcttagctgaacatacccatgatattcaagaacatttttatcgattaagtcagaaagtagcgaaccgggaaactgccgttctctactatgactgcaccaattttttctttgaaatcgaagaagccgaaggcctgaaacaatacgggcattccaaggaaaatcggccgaaccctattgtgcaaatgggattatttatggacggctcgggcattccacttgcttttaatatcacaagcggcaacaccaatgaacaaaccaccctgaaacctttagagaaaagaatccttaaggattttcgcttatcaaaatttgtcgtctgtaccgatgccggtctctcttcaacagccaatcgcaaatacaacaccttaggggagcgtgccttcattaccactcaatcggtcaaaaaaacgaaaaaacatttgaaagactggcttttagataaaagcggttggcgacttagtcatggcaaggaaagctatcacttagacgacattgatgaaaccgctcatttttcagatatcttttataaagaaagatggattcatgaaaatggactcgagcaacgtttcatcgtgagttattccccaaaatatcgccaatatcaagcttctgttcgacaagggcaaattgatcgagctctcaaaaaagttcaggagccttcccggctccaccaaaaaggagcgaatgatgttaatcgcttcatcaaatcaactcatgtcactcaagaaggtgaaattgcccaacaagctgaacatacgattgatcaagatcggatcgaagaagaagcccagtatgatggcttttacgctgtctgcaccaacctcactgaccctgtccaagatatcctttccattaatcaaaagcgatgggaagatcgcaagcttctttccgattga

SEQ ID NO: 3170 - protein, 418 aa, Alloiococcus otitidis
MDPEEWAKQRAAELTEQEKQKKQKIAIHYDPTKKIKKDKQQLFNVGYLFLQSILAQLKLPTMTKKIAKQHQFKYPLDQILSCLIYNRILSPASKKSAFEFAQTLLEPPQFQLQDIYRSLDVLAEHTHDIQEHFYRLSQKVANRETAVLYYDCTNFFFEIEEAEGLKQYGHSKENRPNPIVQMGLFMDGSGIPLAFNITSGNTNEQTTLKPLEKRILKDFRLSKFVVCTDAGLSSTANRKYNTLGERAFITTQSVKKTKKHLKDWLLDKSGWRLSHGKESYHLDDIDETAHFSDIFYKERWIHENGLEQRFIVSYSPKYRQYQASVRQGQIDRALKKVQEPSRLHQKGANDVNRFIKSTHVTQEGEIAQQAEHTIDQDRIEEEAQYDGFYAVCTNLTDPVQDILSINQKRWEDRKLLSD

SEQ ID NO: 3171 - DNA, 1401 bp, Alloiococcus otitidis; identical to SEQ ID NO: 3169
  CDS (7)..(1398)

SEQ ID NO: 3172 - protein, 464 aa, Alloiococcus otitidis
MRIKKSRSKNSVSYAVIKDITRNGKRTTKIVETLGNHEEIKQKHPEMDPEEWAKQRAAELTEQEKQKKQKIAIHYDPTKKIKKDKQQLFNVGYLFLQSILAQLKLPTMTKKIAKQHQFKYPLDQILSCLIYNRILSPASKKSAFEFAQTLLEPPQFQLQDIYRSLDVLAEHTHDIQEHFYRLSQKVANRETAVLYYDCTNFFFEIEEAEGLKQYGHSKENRPNPIVQMGLFMDGSGIPLAFNITSGNTNEQTTLKPLEKRILKDFRLSKFVVCTDAGLSSTANRKYNTLGERAFITTQSVKKTKKHLKDWLLDKSGWRLSHGKESYHLDDIDETAHFSDIFYKERWIHENGLEQRFIVSYSPKYRQYQASVRQGQIDRALKKVQEPSRLHQKGANDVNRFIKSTHVTQEGEIAQQAEHTIDQDRIEEEAQYDGFYAVCTNLTDPVQDILSINQKRWEDRKLLSD

SEQ ID NO: 3173 - DNA, 336 bp, Alloiococcus otitidis
  CDS (109)..(333)
gttattccccaaaatatcgccaatatcaagcttctgttcgacaagggcaaattgatcgagctctcaaaaaagttcaggagccttcccggctccaccaaaaaggagcgaatgatgttaatcgcttcatcaaatcaactcatgtcactcaagaaggtgaaattgcccaacaagctgaacatacgattgatcaagatcggatcgaagaagaagcccagtatgatggcttttacgctgtctgcaccaacctcactgaccctgtccaagatatcctttccattaatcaaaagcgatgggaagatcgcaagcttctttccgattgataaaaaacgactttaa

SEQ ID NO: 3174 - protein, 75 aa, Alloiococcus otitidis
MMLIASSNQLMSLKKVKLPNKLNIRLIKIGSKKKPSMMAFTLSAPTSLTLSKISFPLIKSDGKIASFFPIDKKRL

SEQ ID NO: 3175 - DNA, 363 bp, Alloiococcus otitidis
  CDS (202)..(360)
tcaaaagcgatgggaagatcgcaagcttctttccgattgataaaaaacgactttaaatctcgacccgtttatgtccgtaaagatgcccgaattcaagcccattttctcacttgttttctgtccttaacggtttttcggcttcttgaacagaagttagatcatgcctttacttcccatgagatcatccaaaccttgcgtcaaatggacatgttagaagttcaagatgatgcctatgttccagcctacaaacgcacacggttaacggatcgcttacatgatctttttggttttgaaacggacctcgaaattctctcccaaaaagaaatgaaaaaaattttacgccaatcaaaaaaagccaattag

SEQ ID NO: 3176 - protein, 53 aa, Alloiococcus otitidis
MDMLEVQDDAYVPAYKRTRLTDRLHDLFGFETDLEILSQKEMKKILRQSKKAN

SEQ ID NO: 3177 - DNA, 363 bp, Alloiococcus otitidis; identical to SEQ ID NO: 3175
  CDS (10)..(360)

SEQ ID NO: 3178 - protein, 117 aa, Alloiococcus otitidis
MGRSQASFRLIKNDFKSRPVYVRKDARIQAHFLTCFLSLTVFRLLEQKLDHAFTSHEIIQTLRQMDMLEVQDDAYVPAYKRTRLTDRLHDLFGFETDLEILSQKEMKKILRQSKKAN

SEQ ID NO: 3179 - DNA, 987 bp, Alloiococcus otitidis
  CDS (19)..(984)
gataatggaggaagaaagatgaaagactacagagtgttactatactaccaatatgtaaccatcgatgaccctgaacaatttcgcaaagaccataaaaaaatgtgtgatgaattgaacctgaaagggcggattttagtttcaaaagaaggcttaaatggaaccctttctggtaagaaaaaagacacagacgaatacatgaaccgcatgcaccaagaccctcgctttagccaaatgcctttcaagattgatgaagctgaccaacatgctttcaaaaaaatgcatgtgcgaactcgtcccgaaattgtctcccttcatctaggtgacgaggatgtcgaccctaatcaaactaccggtaagcacttggagccaagtgaattccgggatgccctcttcgatgaagacacagtcgttttagatgccagaaacgattacgagtatgacctaggccactttagaggagcagtcagaccggacatccgcaacttccgtgaactacccgactggatccgggaaaataaagataaattcatggataaaagagtggttgtctactgtacagggggcatccggtgtgaaaaactaagtggttggatgctcaaggaaggcttcgaagatgtcggccaactcaatggtgggatccataactatgccaccgatgaggaaacccagggagaatactgggatggcaaaatgtatgttttcgacgagcgaatcagtgtcgatattaacaagaaagaaaaaacagtcatcggtcgcgactggtttgacggcactccctgtgagcgttacgtcaactgtgccaacccctactgcaacaaacaaatcctcatgtcagaagaaaacgagcacaaatatctccgcggttgcagtcatgaatgccgcatccatcctgaaaaccgctatgtgaaagaacacaatctcagcaaggaagaggtccaagaccggctagaagccatcggtgaatcccttcctgaatatgccaattaa

SEQ ID NO: 3180 - protein, 322 aa, Alloiococcus otitidis
MKDYRVLLYYQYVTIDDPEQFRKDHKKMCDELNLKGRILVSKEGLNGTLSGKKKDTDEYMNRMHQDPRFSQMPFKIDEADQHAFKKMHVRTRPEIVSLHLGDEDVDPNQTTGKHLEPSEFRDALFDEDTVVLDARNDYEYDLGHFRGAVRPDIRNFRELPDWIRENKDKFMDKRVVVYCTGGIRCEKLSGWMLKEGFEDVGQLNGGIHNYATDEETQGEYWDGKMYVFDERISVDINKKEKTVIGRDWFDGTPCERYVNCANPYCNKQILMSEENEHKYLRGCSHECRIHPENRYVKEHNLSKEEVQDRLEAIGESLPEYAN

SEQ ID NO: 3181 - DNA, 522 bp, Alloiococcus otitidis
  CDS (28)..(519)
aagaggctagcaatcaagagattccggttgaagaagaagaaagagaagatcaagcaaccagccaggaccaagtcagttcagaaagtcaggatcaagttagtcaaggccaaaaaagttcagaaggtcaaaaccaacctggccaagaacaaggtcaaggagaggagactagccaggaggaaactagtcagcaagctagcaattctcaagcaagacctgctagtcaaccggctcctagccaagaccagtcttcctctaccaaccaaactaaccaaccagcaactaataataattctagccagtctaaccaaactaaccgtaacaactgcagtcaaacgagccaagcttctagcagtaataattcacgccaagatagccaaactgctagaaacgacaattcaaatcaagttaaccaaagacaagctaaaaaaccagcccagccacaagctaaaccacaaactcagtcggttggccaaccatctctatcctggtcaagtatccagagcacggccaatagctacctag

SEQ ID NO: 3182 - protein, 164 aa, Alloiococcus otitidis
MKKKKEKIKQPARTKSVQKVRIKLVKAKKVQKVKTNLAKNKVKERRLARRKLVSKLAILKQDLLVNRLLAKTSLPLPTKLTNQQLIIILASLTKLTVTTAVKRAKLLAVIIHAKIAKLLETTIQIKLTKDKLKNQPSHKLNHKLSRLANHLYPGQVSRARPIAT

SEQ ID NO: 3183 - DNA, 1833 bp, Alloiococcus otitidis
  CDS (4)..(1830)
gcgatgaagaagaagtttatcaggacatctattaccagttctttaatttttgcccaattgctaacaagtcaggtcgctttggcaagtgattatgacagtgaaatagccaatgcccaagaagcccaaagtcaagtggaagccctggacagtcgtttgagtcaagtcacttcctctagtaagtcaactcaggaccaattaagagacctagaggctgccattgctgataacgaagctaaattagcccaagctagtggagaattagagtccagtcaaggtgactaccaagctttacttgacgagattgacacactggaagcaaacattgaaaaaagagctgaccgtctcaaggaccaggcaagagctgttcaaactaacggtcaaatatctcaatacatagactttattatccaatctgagtccttaaccgatgcctttgcccggttagaccttgtcgttaacttgtttaagtctaaccagtcgattatcaaagaccaggtgaaagacaaggaagctttggaagccattaaagaagaaacaggccaaagtattttgcaccaggcagacttggttgatagcctagaggttaccagtcaagacttggaacaacagcgccttgaccaagaagttttgttggctcaattagctgctgaacaagcccaattggcatctgaacgagaccagtttattgcccaaagagaccaggcccaggcccaagctgaccgcctctttgcccaaagccaagagattgctctagcccaagaagtagcccaggaccaaattgaagtcagtgaagaagctaatgacgttgatttagttgaagaaacccgtcaagcattggatcaagctgaaatcgtagaagaagacgaccttgaccctcaagagggggaagaggaacagactcaacaagagcttgacccagaagttgcagaagaagttattgaagaaggtcaagtcgaagcgagccctggacaagattcagaagatgaagctgggatagaagaggctagcaatcaagagattccggttgaagaagaagaaagagaagatcaagcaaccagccaggaccaagtcagttcagaaagtcaggatcaagttagtcaaggccaaaaaagttcagaaggtcaaaaccaacctggccaagaacaaggtcaaggagaggagactagccaggaggaaactagtcagcaagctagcaattctcaagcaagacctgctagtcaaccggctcctagccaagaccagtcttcctctaccaaccaaactaaccaaccagcaactaataataattctagccagtctaaccaaactaaccgtaacaactgcagtcaaacgagccaagcttctagcagtaataattcacgccaagatagccaaactgctagaaacgacaattcaaatcaagttaaccaaagacaagctaaaaaaccagcccagccacaagctaaaccacaaactcagtcggttggccaaccatctctatcctggtcaagtatccagagcacggccaatagctacctaggcaccccttaccgttggggtggatcttcaagatctggccttgactgttctggttttactcaattggtctacagccaacacggtatttcccttccacggaactcccgggcccagtatgcagcaaccaaacgtatatccaaccctgcccctggtgacttaatcttctttggaaacggaggtcgggtaacccacgtaggaatttatgctggtggcggccaatttattggttctcaaacttcaacgggtgtggcctatgccaatgcccacactggctactggggagcacgtttcattggttacggccgggttaactaa

SEQ ID NO: 3184 - protein, 609 aa, Alloiococcus otitidis
MKKKFIRTSITSSLIFAQLLTSQVALASDYDSEIANAQEAQSQVEALDSRLSQVTSSSKSTQDQLRDLEAAIADNEAKLAQASGELESSQGDYQALLDEIDTLEANIEKRADRLKDQARAVQTNGQISQYIDFIIQSESLTDAFARLDLVVNLFKSNQSIIKDQVKDKEALEAIKEETGQSILHQADLVDSLEVTSQDLEQQRLDQEVLLAQLAAEQAQLASERDQFIAQRDQAQAQADRLFAQSQEIALAQEVAQDQIEVSEEANDVDLVEETRQALDQAEIVEEDDLDPQEGEEEQTQQELDPEVAEEVIEEGQVEASPGQDSEDEAGIEEASNQEIPVEEEEREDQATSQDQVSSESQDQVSQGQKSSEGQNQPGQEQGQGEETSQEETSQQASNSQARPASQPAPSQDQSSSTNQTNQPATNNNSSQSNQTNRNNCSQTSQASSSNNSRQDSQTARNDNSNQVNQRQAKKPAQPQAKPQTQSVGQPSLSWSSIQSTANSYLGTPYRWGGSSRSGLDCSGFTQLVYSQHGISLPRNSRAQYAATKRISNPAPGDLIFFGNGGRVTHVGIYAGGGQFIGSQTSTGVAYANAHTGYWGARFIGYGRVN

SEQ ID NO: 3185 - DNA, 1833 bp, Alloiococcus otitidis
  CDS (28)..(1830)
ggatacagtattacgaggaggattagtatggtttatcaagacacttggaacttagaatcggtatttgaaggcgggccaaactcccctgccctccatgaaaaattagacttggtgaaagaccagatcactagctttaaggaaaaaattgaagcttggcaaacagaccatgaccaggtcgaccaggaccaatttattgatattttagcagaccgggccaagattgccaagggactgaaccagtcagggacctttgccaacgctcacttgtcagctgatgtgaatgacaccgtatccctaaacaatctaaaccaggttagcctgctggaacatgactttagtcaaaccctcacccttttaagcaaaaaaatacaagaaattaatgaagacgattggcaaaacttgctagaagaagaccctttcaaagaccttgcctttcgtttaaatgaaatccgccgtgatgctaataagttactcagtcctgaccaggaaaaaattattagccaactaagtccagatggctaccaaggatgggagtccatgtacaatgacctagtagcccaggtcaaagtacctatcgaagaagaggggaaggtcaattattactcagccgcccaagcccaaaacaagttaaccagccaggaagaccctagcaaaaggtcagaaatcttaaaggcctgggagcaagcttggcaagacaaggcaagcctctttgcaaccaccctcaaccatatcgtgggctttaacctggctaaccaagccttgcacggggaagaggacttcctcaaacctgccttagaaaataaccgcttgaatcaaaaaagcctggataccatgtggaagaccatcaatcaaaataaagaccatgtgatcaaatacatggaacgcaaggcccaactgcaaggtctagaccagttaggctgggctgatttagaagcccccttaactgtcggagaatttaaacccgcaacttatagctttgaccaagcagcagaatttattatggacaactttgcccaggtcagcccgcaaatgaaagacctggcccaaaaagccttcgacggtgcttggatcgaagctgaagaccgggctagtaaacggccaggtggttactgttcggaccttccagagtccaaagagtctagaatctttatgaccttctctggcagtcccgacaatgtctccacccttgcccacgagctcggacatgccttccactcctatgttttacgggaccaagcctacttgaaccaggaatatgctatgaatgtcgccgaaactgcttctacttttgctgaaatggtggtatcagatgctaccattcaaaatgcgaattctatagaagaaaaaatttcccttttagacagcaagatttcccgggcagctgttatgtttatgaacatccagtcccgttttattttcgagaagtctttctatgctgaacggaagactggcttagtctctccagatcgggctaatgaattgatggtggaagcccaaaagcaggcctttggggacgccttatcggtctaccaccctagcttctgggccagcaagctccacttttacatgacagaccaagccttttacaacttcccttatacctttggcttcttatttagtatgggaatttacgcccaagccaaagaagcaggcgaccaatttgaagaccgttatattgacttgctcaaagatacagcctgcatgaccagtgaagacctggttcaaaaacatttaggctatgacttagaagaaccagacttctggcaatcagccattgacctagtcaagcaagatattgatgaattcctaaaccttacagaggcatacttgtaa

SEQ ID NO: 3186 - protein, 601 aa, Alloiococcus otitidis
MVYQDTWNLESVFEGGPNSPALHEKLDLVKDQITSFKEKIEAWQTDHDQVDQDQFIDILADRAKIAKGLNQSGTFANAHLSADVNDTVSLNNLNQVSLLEHDFSQTLTLLSKKIQEINEDDWQNLLEEDPFKDLAFRLNEIRRDANKLLSPDQEKIISQLSPDGYQGWESMYNDLVAQVKVPIEEEGKVNYYSAAQAQNKLTSQEDPSKRSEILKAWEQAWQDKASLFATTLNHIVGFNLANQALHGEEDFLKPALENNRLNQKSLDTMWKTINQNKDHVIKYMERKAQLQGLDQLGWADLEAPLTVGEFKPATYSFDQAAEFIMDNFAQVSPQMKDLAQKAFDGAWIEAEDRASKRPGGYCSDLPESKESRIFMTFSGSPDNVSTLAHELGHAFHSYVLRDQAYLNQEYAMNVAETASTFAEMVVSDATIQNANSIEEKISLLDSKISRAAVMFMNIQSRFIFEKSFYAERKTGLVSPDRANELMVEAQKQAFGDALSVYHPSFWASKLHFYMTDQAFYNFPYTFGFLFSMGIYAQAKEAGDQFEDRYIDLLKDTACMTSEDLVQKHLGYDLEEPDFWQSAIDLVKQDIDEFLNLTEAYL

SEQ ID NO: 3187 - DNA, 732 bp, Alloiococcus otitidis
  CDS (145)..(729)
gaagtgatttttgtggcaggacactcgaagtggaataatatcaagcagcgtaaaggtgctcaagataagaaaagaagtaagcaattccagaaatactctaaagagatctacaaggcagcaaaagatggtggccctgatcccgaaatgaacgcttcactgcggatggctattgacaaggccaagtcaggtaatatgcctaacgacaatattgaccgtgctattaagcgggcaaccgaccccaatgaaggggctaactacgatgaagtctcctatgaaggctatggtccaaatggtgtaggtatatatgttgaaaccctaaccgataacaccaaccggacagcaaccaatgtccgcgttgcctttgaccgcaatgggggcaacttaggcgagaaggggtctgtttcttacatgttcgagcggaaaggctatattgtcgtggaacgcgatggcttggacctagacgaagatgacatgctccttgccgtaatcgaagctggtggggaagacatggaagcatcagatgatgtctttgaaatttatacccaggccagtgacttcaccgatgtcgttgatgaactggaaaaagacttcaccctggcccacaaggaattgaccatggtaccaaacattaaggtcagcctatctgaagaagatgaaaacaagttaaacaacctagtggatgccttagaagatgacgacgatgttaatgaagtctacaccaatgcggaataa

SEQ ID NO: 3188 - protein, 195 aa, Alloiococcus otitidis
MNASLRMAIDKAKSGNMPNDNIDRAIKRATDPNEGANYDEVSYEGYGPNGVGIYVETLTDNTNRTATNVRVAFDRNGGNLGEKGSVSYMFERKGYIVVERDGLDLDEDDMLLAVIEAGGEDMEASDDVFEIYTQASDFTDVVDELEKDFTLAHKELTMVPNIKVSLSEEDENKLNNLVDALEDDDDVNEVYTNAE

SEQ ID NO: 3189 - DNA, 732 bp, Alloiococcus otitidis; identical to SEQ ID NO: 3187
  CDS (4)..(729)

SEQ ID NO: 3190 - protein, 242 aa, Alloiococcus otitidis
MIFVAGHSKWNNIKQRKGAQDKKRSKQFQKYSKEIYKAAKDGGPDPEMNASLRMAIDKAKSGNMPNDNIDRAIKRATDPNEGANYDEVSYEGYGPNGVGIYVETLTDNTNRTATNVRVAFDRNGGNLGEKGSVSYMFERKGYIVVERDGLDLDEDDMLLAVIEAGGEDMEASDDVFEIYTQASDFTDVVDELEKDFTLAHKELTMVPNIKVSLSEEDENKLNNLVDALEDDDDVNEVYTNAE

SEQ ID NO: 3191 - DNA, 1152 bp, Alloiococcus otitidis
  CDS (37)..(1149)
tgtttttgcaagaattcattcatagggggaattatcatgagtcacaaatttaccggaaagcacgattttgttggaagttttttaagacccgaacaattagtaaaggcccgacaagactataaagaagggaagattgaccgaccagccctaaagcaagttgaggatcaggaaattgaaaaattaattaacaagctaaaagaattaggctatgaattcattacggatggggaatttagaagagatacctggcacttagactttatgtggggcttccttggggttgaccacaagcccactaatactgggattcaattttcaggtatcgtagcagaactggatgacaccttcctagtcgacaaactctccttcaacgaaaaccaccccttcttggaccacttagcctttgtccaacaatttgaagatgaaaaccataccgccaaactaactgtccccgcaccagctcaattccttaaacaattcattagtcctgaagaaagggagaatacaggtaaattttacaatagccgggcagagttagccgacgatattgtttctctttaccggcaatttatccaaaaagcctatgattctggcctccgttacttacaattcgatgatgtctcttggggccggctggttgatgacaaagcgcctgaacacttcgggactgaccaggctggcgttgaagagttaaaacaagtttttgtggacaccaacaaccgggtgatcgctgaccggccagaagacttggtcgtcaatacccatgtctgtcgcggaaacttccagtctacctactcagccagtggcccctacgaccgggtagccgaattcctctttgaggaagaaaatgtcaacagttactttctcgagtttgatgatgaccggtctggaggctttgaccctttacaaaaaataagcggggacaaggaagttgtcttgggtttgatcacttccaaacgccctgaactggaagataaagaccagatcattgaccgaatccaccaagctgccgaatatatcccactagaccggctcagcttgtctcctcaatgcggttttgcttcaaccgaacatgggaacaagttaagcttagaagaccaatggaataaacttcgcttggtcaaagacattgcagatgaggtctgggcttaa

SEQ ID NO: 3192 - protein, 371 aa, Alloiococcus otitidis
MSHKFTGKHDFVGSFLRPEQLVKARQDYKEGKIDRPALKQVEDQEIEKLINKLKELGYEFITDGEFRRDTWHLDFMWGFLGVDHKPTNTGIQFSGIVAELDDTFLVDKLSFNENHPFLDHLAFVQQFEDENHTAKLTVPAPAQFLKQFISPEERENTGKFYNSRAELADDIVSLYRQFIQKAYDSGLRYLQFDDVSWGRLVDDKAPEHFGTDQAGVEELKQVFVDTNNRVIADRPEDLVVNTHVCRGNFQSTYSASGPYDRVAEFLFEEENVNSYFLEFDDDRSGGFDPLQKISGDKEVVLGLITSKRPELEDKDQIIDRIHQAAEYIPLDRLSLSPQCGFASTEHGNKLSLEDQWNKLRLVKDIADEVWA

SEQ ID NO: 3193 - DNA, 291 bp, Alloiococcus otitidis
  CDS (4)..(288)
caaatggttaaaggaccgtggctggtctgcttgactagcatggttgccttgtctttttgccagcaagtcttgaagggatttgccgtagcgaacatcatagaggacggcccgtttttggtcagctgggatatggttgcaggctgtctggcagtccccttggcaaaagggacaatacttaggcaacaatttttgaaaggccaggccaatcaaggtctggcccaagacttccgggctgatccccaactcttgcagccggtcaaccaccccagctgcatccttggcatggactga

SEQ ID NO: 3194 - protein, 95 aa, Alloiococcus otitidis
MVKGPWLVCLTSMVALSFCQQVLKGFAVANIIEDGPFLVSWDMVAGCLAVPLAKGTILRQQFLKGQANQGLAQDFRADPQLLQPVNHPSCILGMD

SEQ ID NO: 3195 - DNA, 1101 bp, Alloiococcus otitidis
  CDS (37)..(1098)
ccaggagcaaaaatagatgtgaaaagagggaagcatatggaagtcgaagcctacgccaaaaagatcttggctctggcccaccattaccggaccagtgatatccacctgatgccggaagcaggctattaccaaatctactaccgcttgagtggccagatggtccagcagtttagcttgtcggtaaaggaaggggagagtttgatctcttacttgaaatttttggctaatatggatgtgggggagaggagaaggccccaaagtgggtcctgcagtctcaaattaccggacgtaatggacctccgcttatcaacgatcgctaattaccgcggtcaggagtccttggttatccgtcttttagccagccaggaggaaggtcaaagtcgggcagattgcttctttgaccatgaaaggcaggttttagaggatttggtcaagtataagagtggcctcatcctctttgcaggacctgttgactctggcaagacgacgaccatgtacaggttggtaaagaaacggtcggctagccacaagcaacaagtgatctccattgaagacccggtagaaattgaagaggcagatttcttacaggtccaggtcaacgaagctggaggagtcacctatgaagccttaattaagtccagcctccgccaccaccccgatgtcctcttggtaggggaaataagggatgaagaaactgcccgaatggtaatccggggggctttgactggtcatttaattatcgcttcagtccatgccaaggatgcagctggggtggttgaccggctgcaagagttggggatcagcccggaagtcttgggccagaccttgattggcctggcctttcaaaaattgttgcctaagtattgtcccttttgccaaggggactgccagacagcctgcaaccatatcccagctgaccaaaaacgggccgtcctctatgatgttcgctacggcaaatcccttcaagacttgctggcaaaaagacaaggcaaccatgctagtcaagcagaccagccacggtcctttaaccatttgctaaagaaggtgtatgtctatggttttatttcgcaagaaacctatcaaagctacaagatcccttaa

SEQ ID NO: 3196 - protein, 354 aa, Alloiococcus otitidis
MEVEAYAKKILALAHHYRTSDIHLMPEAGYYQIYYRLSGQMVQQFSLSVKEGESLISYLKFLANMDVGERRRPQSGSCSLKLPDVMDLRLSTIANYRGQESLVIRLLASQEEGQSRADCFFDHERQVLEDLVKYKSGLILFAGPVDSGKTTTMYRLVKKRSASHKQQVISIEDPVEIEEADFLQVQVNEAGGVTYEALIKSSLRHHPDVLLVGEIRDEETARMVIRGALTGHLIIASVHAKDAAGVVDRLQELGISPEVLGQTLIGLAFQKLLPKYCPFCQGDCQTACNHIPADQKRAVLYDVRYGKSLQDLLAKRQGNHASQADQPRSFNHLLKKVYVYGFISQETYQSYKIP

SEQ ID NO: 3197 - DNA, 1101 bp, Alloiococcus otitidis; identical to SEQ ID NO: 3195
  CDS (19)..(1098)

SEQ ID NO: 3198 - protein, 360 aa, Alloiococcus otitidis
MKRGKHMEVEAYAKKILALAHHYRTSDIHLMPEAGYYQIYYRLSGQMVQQFSLSVKEGESLISYLKFLANMDVGERRRPQSGSCSLKLPDVMDLRLSTIANYRGQESLVIRLLASQEEGQSRADCFFDHERQVLEDLVKYKSGLILFAGPVDSGKTTTMYRLVKKRSASHKQQVISIEDPVEIEEADFLQVQVNEAGGVTYEALIKSSLRHHPDVLLVGEIRDEETARMVIRGALTGHLIIASVHAKDAAGVVDRLQELGISPEVLGQTLIGLAFQKLLPKYCPFCQGDCQTACNHIPADQKRAVLYDVRYGKSLQDLLAKRQGNHASQADQPRSFNHLLKKVYVYGFISQETYQSYKIP

SEQ ID NO: 3199 - DNA, 1077 bp, Alloiococcus otitidis
  CDS (688)..(1074)
agaaggtgtatgtctatggttttatttcgcaagaaacctatcaaagctacaagatcccttaagtcactgcataaccaggccatcttcctgaagcggctcggccagcttctactagaaggtttatccatgcaagaagcccttcgtttcctaagtacaaccggtaaccaagaaattaagcaatgggttaaccatgtacaagcaggctttagccaaggcaggaccctagatgaaatgttaggggagttgaacttttcggaccaggtagcttcgcaaatctacttttcccaggttcatggccagtttgcccagacgatcagtgattgtggccaacaaatgatggaccggatggagcggaagaaaaagctccagcagatcctaacctatcccatcatgctcatcatttttatcatcggcatgctctttgccatgaggtatatcttactaccccacttaacccaattgaccacttctgaaaccaaccatatgaatttggggactcgactggtttttatctttatccgcgagtcccccatcctcttaatcctagccacatgtctgtttagtttggccttgctcgtctttcagtactacttatccaaaaaaactgccctagccaaggcctctattctctgtcaactccctctggccaggctggtcttacccctttactatacccagtttttggccatggagtggggccaccttcttaatcatggcagtaacctgcttgagattacccaaatcatgaccaccgacaagaataccaatctggtgaaagaacttggccaagccatcgcccaagggatgcaggctggccagtcttttaagacctctattagtgactatagatttttaaagtatgaattaagggatattattgattatggggaagagtccagtgaccttggcaaggaattattgctctattccaggcagtgccaggaagaattatcgctaatagtcgaaaaaattatgaccctggtccagcccttggtttttatcggtatcggcatcctgattgtttccatctatgccgccttgctcctacctactttttctttgctgaatggcttgtaa

SEQ ID NO: 3200 - protein, 129 aa, Alloiococcus otitidis
MEWGHLLNHGSNLLEITQIMTTDKNTNLVKELGQAIAQGMQAGQSFKTSISDYRFLKYELRDIIDYGEESSDLGKELLLYSRQCQEELSLIVEKIMTLVQPLVFIGIGILIVSIYAALLLPTFSLLNGL

SEQ ID NO: 3201 - DNA, 1077 bp, Alloiococcus otitidis; identical to SEQ ID NO: 3199
  CDS (484)..(1074)

SEQ ID NO: 3202 - protein, 197 aa, Alloiococcus otitidis
MNLGTRLVFIFIRESPILLILATCLFSLALLVFQYYLSKKTALAKASILCQLPLARLVLPLYYTQFLAMEWGHLLNHGSNLLEITQIMTTDKNTNLVKELGQAIAQGMQAGQSFKTSISDYRFLKYELRDIIDYGEESSDLGKELLLYSRQCQEELSLIVEKIMTLVQPLVFIGIGILIVSIYAALLLPTFSLLNGL

SEQ ID NO: 3203 - DNA, 1077 bp, Alloiococcus otitidis; identical to SEQ ID NO: 3199
  CDS (10)..(1074)

SEQ ID NO: 3204 - protein, 355 aa, Alloiococcus otitidis
MSMVLFRKKPIKATRSLKSLHNQAIFLKRLGQLLLEGLSMQEALRFLSTTGNQEIKQWVNHVQAGFSQGRTLDEMLGELNFSDQVASQIYFSQVHGQFAQTISDCGQQMMDRMERKKKLQQILTYPIMLIIFIIGMLFAMRYILLPHLTQLTTSETNHMNLGTRLVFIFIRESPILLILATCLFSLALLVFQYYLSKKTALAKASILCQLPLARLVLPLYYTQFLAMEWGHLLNHGSNLLEITQIMTTDKNTNLVKELGQAIAQGMQAGQSFKTSISDYRFLKYELRDIIDYGEESSDLGKELLLYSRQCQEELSLIVEKIMTLVQPLVFIGIGILIVSIYAALLLPTFSLLNGL

SEQ ID NO: 3205 - DNA, 1395 bp, Alloiococcus otitidis
  CDS (28)..(1392)
aggacaggagtaagtgagaggtgtcttatggataatcgattttggcaagaggaagacgaagcggttgaattggccttaaattgggctaagaaaagaacagtatctggatctgaccccaaggctacagcccattcagccgaatacctcagagaacaagtgggccagaccattaccgaagagggcatgggtcccaaagaagccttagctatctatgaggtcctcagtgaatccaaccggtcttctgacgatcccatgaactttgcctacatccctagtgcaccaaccagggcggcagttgcctttgatgaagtagtgtcagcagcgaatgttttcggtggcatttgggagtgtggggctggcagtatatatgctgagaaccaagttgtagactggatcaaaggctacttaggctggccggaccaagcgattgggaccttcgtttcaggaggaacttacggcaacctgtctgccttggcatgtgctagggacaaggccaaaaatacttggaagcaagccggtacttacccggatggtcggccccaggatggctataagctgattatttcagaagaaacccactcttcgcttgaaattatcgccaaggttttggatgtcgaccttttaatagcggaggtagacgaaaaaggccggatgagcggccaggctgttgaggatttaatcaaagaccatgaaggtgtctttgcggttgtggcctcaactgggaccaccaataccgggtccatagaccacttggagtccatcgctaaggtctgttcaaaccaccaagtatggctacatgtggacggggcctatgggggagcaggtctattagccccaagtgtaagacagctttataaggggattgaagctgccgattcctttatagtcgatcctcacaaatggttatttgctccctatgacgcttgcctactcgtctaccggagtcctgaaagtgtctaccaaaccttttcccaacatgctgcctacctggatggggtggaccacagtcaaagtaatccttctgatatggcagtccacctttcccgaagaaccagaggccttcccttgtggtattccctagcgacttacggaagcaaaaaatacagccaagccattgaaacctgcctggactacgcgagacaatgtgcccaggccatcaaagccagcgaccacctggaattagttatggaaccaaccctgtccattgttgtctttaaacgaaaaggttgggaccaagaagactatgataaatggtctcatgacctagccttagccggcaaactcctatgcctaccttcttcaatcaagggccaaaccgtcctccgcctagccttcttgaatcctaacaccgatattgaccaatccattcaaatagtccttgagacgacaaaatag

SEQ ID NO: 3206 - protein, 455 aa, Alloiococcus otitidis
MDNRFWQEEDEAVELALNWAKKRTVSGSDPKATAHSAEYLREQVGQTITEEGMGPKEALAIYEVLSESNRSSDDPMNFAYIPSAPTRAAVAFDEVVSAANVFGGIWECGAGSIYAENQVVDWIKGYLGWPDQAIGTFVSGGTYGNLSALACARDKAKNTWKQAGTYPDGRPQDGYKLIISEETHSSLEIIAKVLDVDLLIAEVDEKGRMSGQAVEDLIKDHEGVFAVVASTGTTNTGSIDHLESIAKVCSNHQVWLHVDGAYGGAGLLAPSVRQLYKGIEAADSFIVDPHKWLFAPYDACLLVYRSPESVYQTFSQHAAYLDGVDHSQSNPSDMAVHLSRRTRGLPLWYSLATYGSKKYSQAIETCLDYARQCAQAIKASDHLELVMEPTLSIVVFKRKGWDQEDYDKWSHDLALAGKLLCLPSSIKGQTVLRLAFLNPNTDIDQSIQIVLETTK

SEQ ID NO: 3207 - DNA, 798 bp, Alloiococcus otitidis
  CDS (163)..(795)
gggaacatattgactttattagagctaaaaaatattgctaaagtgtttgacacccagtctggtcctttcgaggctgtccagtccatttcttttaccattgatcacggtcagattgtcgcccttttaggaccaaatggcgcaggcaagacgacgacagttcagatgattgctggttacctagaagccactaggggaactatgtatatgggaggccaggaactaacccagaaaaatcgccgccactctcagataggagttgtcttgggaggggaactgggtttttatggcaatgccagtgcatgggataatctcgtttttttctcccacctagataaaatctctcggtcagacatcaaaagggaagttaaacgagttttaagtctagttgacctatcttctgttgcccaagagaaggtatataccttttccagagggatgaggcaacgccttcacattgcccggtccttgctgagccatccccagttattgctcttggatgaaccgacgaccgggttagatgttgagattagcaaagagattcaggacttagtcaagcaactcgctcaggaagaagaagttggcattcttttaactagccatcaaatgtcagaagttgagtacttggcagatgaaatcctcctcttaggggatgggaaaattcaacataaggggaatgttgaaagcattgttgctctttctaaggtgacccatgtggaccgtccagcaactttggaagaatcctatctcgcccttgcctctcagttgaaaagggggccttctgatgattcgcttctttag

SEQ ID NO: 3208 - protein, 211 aa, Alloiococcus otitidis
MIAGYLEATRGTMYMGGQELTQKNRRHSQIGVVLGGELGFYGNASAWDNLVFFSHLDKISRSDIKREVKRVLSLVDLSSVAQEKVYTFSRGMRQRLHIARSLLSHPQLLLLDEPTTGLDVEISKEIQDLVKQLAQEEEVGILLTSHQMSEVEYLADEILLLGDGKIQHKGNVESIVALSKVTHVDRPATLEESYLALASQLKRGPSDDSLL

SEQ ID NO: 3209 - DNA, 798 bp, Alloiococcus otitidis; identical to SEQ ID NO: 3207
  CDS (43)..(795)

SEQ ID NO: 3210 - protein, 251 aa, Alloiococcus otitidis
MFDTQSGPFEAVQSISFTIDHGQIVALLGPNGAGKTTTVQMIAGYLEATRGTMYMGGQELTQKNRRHSQIGVVLGGELGFYGNASAWDNLVFFSHLDKISRSDIKREVKRVLSLVDLSSVAQEKVYTFSRGMRQRLHIARSLLSHPQLLLLDEPTTGLDVEISKEIQDLVKQLAQEEEVGILLTSHQMSEVEYLADEILLLGDGKIQHKGNVESIVALSKVTHVDRPATLEESYLALASQLKRGPSDDSLL

SEQ ID NO: 3211 - DNA, 798 bp, Alloiococcus otitidis; identical to SEQ ID NO: 3207
  CDS (10)..(795)

SEQ ID NO: 3212 - protein, 262 aa, Alloiococcus otitidis
MTLLELKNIAKVFDTQSGPFEAVQSISFTIDHGQIVALLGPNGAGKTTTVQMIAGYLEATRGTMYMGGQELTQKNRRHSQIGVVLGGELGFYGNASAWDNLVFFSHLDKISRSDIKREVKRVLSLVDLSSVAQEKVYTFSRGMRQRLHIARSLLSHPQLLLLDEPTTGLDVEISKEIQDLVKQLAQEEEVGILLTSHQMSEVEYLADEILLLGDGKIQHKGNVESIVALSKVTHVDRPATLEESYLALASQLKRGPSDDSLL

SEQ ID NO: 3213 - DNA, 759 bp, Alloiococcus otitidis
  CDS (295)..(756)
aaagggggccttctgatgattcgcttctttagtttggcatggtttcatttaaaaatatatgctaaaaattcatactttatcaatttaatgatcaccagtactctatccatgttctttttagactatattgcccagtctgcacttggtgcagacttgagccagattatttggattcgtgcttcaatctttggcttatgggcatccggcacgacagctgccggatccattggctttcaacgttttcaggggaccctgctttatctgattaatacagcctataatgaccaactctccttggcagctcttattgctcctgcagctagttttggtttgttaagcttccccctagctattttggcagcctttatcttccaagtaccggtcagaatccaaggatcttttatcctagctggactggctctctggttaggagctttggtgttagatttattgattgcttctgtttttgtcttaaccaaaaatgcaattgtctatgaagacttattaaccttaccattattgttcatgtctggtctctttccactaccaggatttttgcagtcgatccagccccttgtcaattggcttttgccgattgccttgcctatccaatggttactcggttttgaggcattgagtgcctttaccgtctttcagttcatcgtttgcttggccttgtctcttgttttaagcataaatattagtaagtatattctgaaacaagcccgtgtttctggcaagttaggaggcgttttatga

SEQ ID NO: 3214 - protein, 154 aa, Alloiococcus otitidis
MAALIAPAASFGLLSFPLAILAAFIFQVPVRIQGSFILAGLALWLGALVLDLLIASVFVLTKNAIVYEDLLTLPLLFMSGLFPLPGFLQSIQPLVNWLLPIALPIQWLLGFEALSAFTVFQFIVCLALSLVLSINISKYILKQARVSGKLGGVL

SEQ ID NO: 3215 - DNA, 759 bp, Alloiococcus otitidis; identical to SEQ ID NO: 3213
  CDS (154)..(756)

SEQ ID NO: 3216 - protein, 201 aa, Alloiococcus otitidis
MSQIIWIRASIFGLWASGTTAAGSIGFQRFQGTLLYLINTAYNDQLSLAALIAPAASFGLLSFPLAILAAFIFQVPVRIQGSFILAGLALWLGALVLDLLIASVFVLTKNAIVYEDLLTLPLLFMSGLFPLPGFLQSIQPLVNWLLPIALPIQWLLGFEALSAFTVFQFIVCLALSLVLSINISKYILKQARVSGKLGGVL

SEQ ID NO: 3217 - DNA, 759 bp, Alloiococcus otitidis; identical to SEQ ID NO: 3213
  CDS (16)..(756)

SEQ ID NO: 3218 - protein, 247 aa, Alloiococcus otitidis
MIRFFSLAWFHLKIYAKNSYFINLMITSTLSMFFLDYIAQSALGADLSQIIWIRASIFGLWASGTTAAGSIGFQRFQGTLLYLINTAYNDQLSLAALIAPAASFGLLSFPLAILAAFIFQVPVRIQGSFILAGLALWLGALVLDLLIASVFVLTKNAIVYEDLLTLPLLFMSGLFPLPGFLQSIQPLVNWLLPIALPIQWLLGFEALSAFTVFQFIVCLALSLVLSINISKYILKQARVSGKLGGVL

SEQ ID NO: 3219 - DNA, 777 bp, Alloiococcus otitidis
  CDS (382)..(774)
gtatattctgaaacaagcccgtgtttctggcaagttaggaggcgttttatgaaagttgtcctttcatctattgatgttttagacaattggaagaccttcttaatccatttttttattcttcctattttagaaacgtttgttttccttgcccttcattatcaaattaccgcaagtttcaatagtcgtttggttgtggcatctttgcttttagctagtgggaccactgcaatgaaccagatgggcgggtcctttacccaggatattattagggggattgaccgtgatttagttaggaagtcgccctataacctgtatttctgggggtcaaaatttgtcgtgatcttcgtattttctttgaccttgtttttgactaacagtctcttgttttggttagcaggggttgattctagagccttaataatgggtttgctattaagtccattaatcatcctctttggactaattattggcctagcatgtgccatctttggttggcgcttgcaaaaccattatgcttttaccaatttttttgtgagttttgcccttgtcttttcaggtgtggtcgtcccttattggttatatccgccccttttttatcccctaacttacatcctgccctttgcccgtatcatggccatgcttttttcaggtgccttttccgttcacttgtttttgcaagacgggctgattgccttggtctggtttttattagctgtcatttgctaccagtaccaggttaaacgaatcgctacttacacacgcaagggtatgttataa

SEQ ID NO: 3220 - protein, 131 aa, Alloiococcus otitidis
MFWLAGVDSRALIMGLLLSPLIILFGLIIGLACAIFGWRLQNHYAFTNFFVSFALVFSGVVVPYWLYPPLFYPLTYILPFARIMAMLFSGAFSVHLFLQDGLIALVWFLLAVICYQYQVKRIATYTRKGML

SEQ ID NO: 3221 - DNA, 777 bp, Alloiococcus otitidis; identical to SEQ ID NO: 3219
  CDS (49)..(774)

SEQ ID NO: 3222 - protein, 242 aa, Alloiococcus otitidis
MKVVLSSIDVLDNWKTFLIHFFILPILETFVFLALHYQITASFNSRLVVASLLLASGTTAMNQMGGSFTQDIIRGIDRDLVRKSPYNLYFWGSKFVVIFVFSLTLFLTNSLLFWLAGVDSRALIMGLLLSPLIILFGLIIGLACAIFGWRLQNHYAFTNFFVSFALVFSGVVVPYWLYPPLFYPLTYILPFARIMAMLFSGAFSVHLFLQDGLIALVWFLLAVICYQYQVKRIATYTRKGML

SEQ ID NO: 3223 - DNA, 255 bp, Alloiococcus otitidis
  CDS (19)..(252)
aaatcatttaaactggcaatggccaaagctgatccctcccgtggttccgtgccactgccaatttcatctagtaatactagggtatggcgttttagttttttgccaatcattgccaaggcctggatatggctagagaaagtgcttaaggatcgttcaatactttggttatccccgatttcgacaaaaatctcttcaaagatagctagttctgttccctcttcacaagggacgagtaagccagacatggccatatag

SEQ ID NO: 3224 - protein, 78 aa, Alloiococcus otitidis
MAKADPSRGSVPLPISSSNTRVWRFSFLPIIAKAWIWLEKVLKDRSILWLSPISTKISSKIASSVPSSQGTSKPDMAI

SEQ ID NO: 3225 - DNA, 1920 bp, Alloiococcus otitidis
  CDS (49)..(1917)
acgaatcgctacttacacacgcaagggtatgttataaggaggttggctatgcaggatacaaaagaaattgtcggtttttataagatcttagaccaggtgagtcaacaagctcagtcccaatatgctaaaaagcaaatcctaaaaggagacttgtccccttatttagaagtagcccaaactaaacaggctgaaacagctgaagctaaagctctcttagatggtcagttaagtgttccctttatgggtctgcaacatatagaaggtttgactcagaaagttgaaaagggactcatcctcgaagctggggaactaattgagtacgctgactttctccgtagctcgcgtttgatccggcaattcttccaaaagaatgcctttattgccccaatcttgactggttatacagaaattttaggtgatttttcacaagttgaaaaagaaatttatcaggccattcaccagtctagggtccatgaccaagctagccgtaacttacgaaaaatccgtaaaaaaattacccaaaataaagcttcaatccaaaagaaacttgagaagttcattaaccattcgagtcataaagataagatccaagaagctgttgttattgaaaaagacggtcggttcactgtaccagttaaaagttcctttaagcgacttgtgcccggtcagcttatagccgaaagtagtaaaggtctcactgcctatattgaaccccattctgttagcaaacttgctgaggagagagtcatgctccaagctgaagaaagtagcgaagtttatcaaatcctagcctacttaaccggtttgattcaagcccagatggatggcatccgctcttccatggagtgtattatcgaactggaagtagtcctggcccgggctaaatattcccggtccattaatgggcggccagttcccctcaacaaggcggaatatattaacttagtagaagcaaggacccctctaattgaaaatcccgttcccctatccttaactttagatggaagagagtccagaggtcttgtgataactggagccaatgctggaggtaagacggtggttttaaaaaccgtcaccttaatgacctatatggccatgtctggcttactcgtcccttgtgaagagggaacagaactagctatctttgaagagatttttgtcgaaatcggggataaccaaagtattgaacgatccttaagcactttctctagccatatccaggccttggcaatgattggcaaaaaactaaaacgccataccctagtattactagatgaaattggcagtggcacggaaccacgggagggatcagctttggccattgccagtttaaatgatttttaccgcaaaggggccctcttaatggtcaccacccactacggggaagtgaagaccttcgctaaaaaccatcctcaatttacaacggctgctatggattttgacattgaaaaattagttcctacttaccaagttattatgcatgaaactggtgacagtcaagcctttaccatagcttctaaaatggagctacctcaaactatattagacacggccaaggctatattagaagataaccaattacccttggatgtcaaaacatttgatcctattccgatccaaaaaccagaagagtcagcaatggataccaaaattaatttctcaaaaggggaccgagtctatgcttcggagtttaaacaagaagccttgttttatgaattgaatgcctcgggcgaccaagcgaagatctatattgatggagcctggaagcaaacccctctccaaagactaaaactcttaatctcggctgaagatctctatccagcaaattacgatctagaccgcctatttatggactatgaccagtataagtactaccacgacctctaccgggggtcaaaaaaggcctggaaaaagaaatag

SEQ ID NO: 3226 - protein, 623 aa, Alloiococcus otitidis
MQDTKEIVGFYKILDQVSQQAQSQYAKKQILKGDLSPYLEVAQTKQAETAEAKALLDGQLSVPFMGLQHIEGLTQKVEKGLILEAGELIEYADFLRSSRLIRQFFQKNAFIAPILTGYTEILGDFSQVEKEIYQAIHQSRVHDQASRNLRKIRKKITQNKASIQKKLEKFINHSSHKDKIQEAVVIEKDGRFTVPVKSSFKRLVPGQLIAESSKGLTAYIEPHSVSKLAEERVMLQAEESSEVYQILAYLTGLIQAQMDGIRSSMECIIELEVVLARAKYSRSINGRPVPLNKAEYINLVEARTPLIENPVPLSLTLDGRESRGLVITGANAGGKTVVLKTVTLMTYMAMSGLLVPCEEGTELAIFEEIFVEIGDNQSIERSLSTFSSHIQALAMIGKKLKRHTLVLLDEIGSGTEPREGSALAIASLNDFYRKGALLMVTTHYGEVKTFAKNHPQFTTAAMDFDIEKLVPTYQVIMHETGDSQAFTIASKMELPQTILDTAKAILEDNQLPLDVKTFDPIPIQKPEESAMDTKINFSKGDRVYASEFKQEALFYELNASGDQAKIYIDGAWKQTPLQRLKLLISAEDLYPANYDLDRLFMDYDQYKYYHDLYRGSKKAWKKK

SEQ ID NO: 3227 - DNA, 1920 bp, Alloiococcus otitidis; identical to SEQ ID NO: 3225
  CDS (43)..(1917)

SEQ ID NO: 3228 - protein, 625 aa, Alloiococcus otitidis
MAMQDTKEIVGFYKILDQVSQQAQSQYAKKQILKGDLSPYLEVAQTKQAETAEAKALLDGQLSVPFMGLQHIEGLTQKVEKGLILEAGELIEYADFLRSSRLIRQFFQKNAFIAPILTGYTEILGDFSQVEKEIYQAIHQSRVHDQASRNLRKIRKKITQNKASIQKKLEKFINHSSHKDKIQEAVVIEKDGRFTVPVKSSFKRLVPGQLIAESSKGLTAYIEPHSVSKLAEERVMLQAEESSEVYQILAYLTGLIQAQMDGIRSSMECIIELEVVLARAKYSRSINGRPVPLNKAEYINLVEARTPLIENPVPLSLTLDGRESRGLVITGANAGGKTVVLKTVTLMTYMAMSGLLVPCEEGTELAIFEEIFVEIGDNQSIERSLSTFSSHIQALAMIGKKLKRHTLVLLDEIGSGTEPREGSALAIASLNDFYRKGALLMVTTHYGEVKTFAKNHPQFTTAAMDFDIEKLVPTYQVIMHETGDSQAFTIASKMELPQTILDTAKAILEDNQLPLDVKTFDPIPIQKPEESAMDTKINFSKGDRVYASEFKQEALFYELNASGDQAKIYIDGAWKQTPLQRLKLLISAEDLYPANYDLDRLFMDYDQYKYYHDLYRGSKKAWKKK

SEQ ID NO: 3229 - DNA, 1200 bp, Alloiococcus otitidis
  CDS (34)..(1197)
aaaaccaaaaaacacattgaaaggaagatcattatgactcaactcaatcttacactagacgccaataaattaacagacgcaattttaaattgtgatctggatcaagtgatgaaatccaccttagtgacggtcttaaatgcttatatggagtccgagcgcgaccaatatatgaaaagcaagcggtacgagcgagatgaagatcgctgtgattaccgcaatgggtatgacgagcgagatttcaccacgaaaatcggcaccctcaaactcaacgtacccagaacgcgatcaggcgacttccatacccaattatttgaacttaatcagcggatggatcaaggtctattggctaccatctttgagatgtacgtcaatggcatctccacccgtaaaatgacgaaagtcgtcgaatccctttgtggtcaaaaggtctccaaatcgtttgtctccgatgtcaataaacacctggacaaggatgtctttaactttcaaaagcggtccctcacccatactaatttccgatatatctatgtcgatgccatgtatataaaggtccgagaggataaccgggtggtgtccaaagccctttacatcgcccaaggagtcaatgatgagaataggcgagaaatcatcgggtttaaagtggctgggcaagagtcaacggaaagttggcggtcgttcttcctcgatttaaaagccagaggcattgatacgccgaaaatggtgatttcagatgcccatgcaggcttacggaaagctattcaagaatgttttgtcaacaccacttggcaacgctgtacctttcacttattaagcaatatcaccgatgccttgccgaaaaccacggaccgagtcatccgagatcgtttccaagcggttttattttccagaacccagcaggaagctcgtgaacggaaacaagcattggaggcggaattcgaagaccaagcgaagctggctaaagccttgagcctattggatgagggctttgaagatgccattcagtatcagatcgagccttctccttaccacatgtctttaagaacaaccaattccattgaacgagtcaaccgtgaaattcgacgtcgagaaagagtggtggggattttccccaatatcaaatccgcggaacggctagccggctcggtcttattaaacctgcaggagaattgggaagctcagaactatcgatttttacgatag

SEQ ID NO: 3230 - protein, 388 aa, Alloiococcus otitidis
MTQLNLTLDANKLTDAILNCDLDQVMKSTLVTVLNAYMESERDQYMKSKRYERDEDRCDYRNGYDERDFTTKIGTLKLNVPRTRSGDFHTQLFELNQRMDQGLLATIFEMYVNGISTRKMTKVVESLCGQKVSKSFVSDVNKHLDKDVFNFQKRSLTHTNFRYIYVDAMYIKVREDNRVVSKALYIAQGVNDENRREIIGFKVAGQESTESWRSFFLDLKARGIDTPKMVISDAHAGLRKAIQECFVNTTWQRCTFHLLSNITDALPKTTDRVIRDRFQAVLFSRTQQEARERKQALEAEFEDQAKLAKALSLLDEGFEDAIQYQIEPSPYHMSLRTTNSIERVNREIRRRERVVGIFPNIKSAERLAGSVLLNLQENWEAQNYRFLR

SEQ ID NO: 3231 - DNA, 342 bp, Alloiococcus otitidis
  CDS (166)..(339)
cgaacttttcataaagaaggcgttttttggggaacgattaaagagtttgagaagagggaagtcaagggatttcaagctgtaaaatatatttctttacacgttgaagcaggcgaaattattggcttaattgaaccaattggtgccggaaagaactgccttatcaaaatgatgacggaaatattggagtcaactagtggcacaataacttgtaacggcattacatcatttgataaagacaagcaatactttaaaatcgattggtgtgatactaagttaaaattctcaattaatctaggacttgccagccttaaagaccttagatatgttgcgaattatctatga

SEQ ID NO: 3232 - protein, 58 aa, Alloiococcus otitidis
MMTEILESTSGTITCNGITSFDKDKQYFKIDWCDTKLKFSINLGLASLKDLRYVANYL

SEQ ID NO: 3233 - DNA, 327 bp, Alloiococcus otitidis
  CDS (4)..(324)
gacttgccagccttaaagaccttagatatgttgcgaattatctatgaagttgataccagggactttgaagagcgactaaatgacatggttgacttactcaaagtaagggaaaaattaaaggttccagtgaaaaattatctttaccggaccgtttttgtaatagcttatgaaaatttggccgacaccatagtagaagatgagttagattacacttttgtccggccccttagctctctcctattttatgtcttataccgagtagatatcatgagtgctattaaccttcttataacggccctggtccatgcttatctcttgtcttcctaa

SEQ ID NO: 3234 - protein, 107 aa, Alloiococcus otitidis
MPALKTLDMLRIIYEVDTRDFEERLNDMVDLLKVREKLKVPVKNYLYRTVFVIAYENLADTIVEDELDYTFVRPLSSLLFYVLYRVDIMSAINLLITALVHAYLLSS

SEQ ID NO: 3235 - DNA, 297 bp, Alloiococcus otitidis
  CDS (34)..(294)
gatatagacctatggacccttgttttacatcttttgtcaattttgttagcaacctacctggtctttattcttaaccaacttgctgtatccgtctccttttggaaggagagaagtagcaagatattagctatcccagaatgcatgcttgatttttcgtccagaccagctcccatttattccaaaggcattcgctttatattaacttggctcctgcctattttaacagctattaattcgcccgttttactagtccaaggaaatgattatgccgcattcctaattggcttgtcgttataa

SEQ ID NO: 3236 - protein, 87 aa, Alloiococcus otitidis
MSILLATYLVFILNQLAVSVSFWKERSSKILAIPECMLDFSSRPAPIYSKGIRFILTWLLPILTAINSPVLLVQGNDYAAFLIGLSL

SEQ ID NO: 3237 - DNA, 162 bp, Alloiococcus otitidis
  CDS (1)..(159)
atgggtttatggattggtttaggcatcatattcggtgctgtttttgggagttggactaataatatgggactcgggatcggaattggtcttgccataggggctgcaataggcgcagcggtaagcagcacacaaaaaacgaacaagaagggtaaaagtgaataa

SEQ ID NO: 3238 - protein, 53 aa, Alloiococcus otitidis
MGLWIGLGIIFGAVFGSWTNNMGLGIGIGLAIGAAIGAAVSSTQKTNKKGKSE

SEQ ID NO: 3239 - DNA, 636 bp, Alloiococcus otitidis
  CDS (16)..(633)
tcgagccctatatttatggatcaggtccaattgattttttcctcccccctaattgtttcggctaattttagttggaacctatactttttacggaaagatcactttttaacctatgtccatccccggatcgaaaaaaataagtatatcggtgttcaaattttagccgctcttttattatctttccttatggtagcagtcgtcaatttcttagcagttgggttttcgactttaatcgcaagcccaaccccttatagtgtaaaccccaatggtctaaatggttatttatttagtcacttgcaaatgaaccacccccttttattcggtttcttttggtctatttacaagggtctaatggccagcttaatttgcctactggggcaagtctgggggctgtatagtcataatttatatttaatcttactaggaccctttgttactgtttttttagaaaacctcctatttgccctcttaaatataccagaatacagtttcccgacaacttatatcttgaaccgtttagaaacaaaagccatgactattcccaacttgttactggccattgtcatattttgctttatcatcttcctcactcattacctactaaggagaaaacatgagtccgcgatttcaatctaa

SEQ ID NO: 3240 - protein, 206 aa, Alloiococcus otitidis
MDQVQLIFSSPLIVSANFSWNLYFLRKDHFLTYVHPRIEKNKYIGVQILAALLLSFLMVAVVNFLAVGFSTLIASPTPYSVNPNGLNGYLFSHLQMNHPLLFGFFWSIYKGLMASLICLLGQVWGLYSHNLYLILLGPFVTVFLENLLFALLNIPEYSFPTTYILNRLETKAMTIPNLLLAIVIFCFIIFLTHYLLRRKHESAISI

SEQ ID NO: 3241 - DNA, 1575 bp, Alloiococcus otitidis
  CDS (1339)..(1572)
ggagaaaacatgagtccgcgatttcaatctaagtttatagaattttatcaagtcaataagtacctattattagctaacgtttttgttttttgctttttctttgtcaataacttttctcaaggtagagtgaatggatttcacaatatggaatttgccttgctgaatatggctgaccattattacctattgaatggtgtttttccacttttgctcctaatgctgacccgttattttaagcaggaaagagaagaagaagtcatccgctttgtttaccgcagggcccaaatcaggaatgaagtgaggctattagcttgctggttagccttgtattttgggatccacctcatgttgtccctggtcttagcgactatcttttttcctttttccctttcttttgaagctagcctgtcgagtaggaaccttgacatcatgatgtttctagaaggttttatggccttgttttccaatccagttttcgctttgctagctagctttgtgtatttgattttcggatggctggttctggtttcaattttatcactagtgaatagccattttggctaccgcaaattagtgacggtgacggtcgtcattctcatcctaacttatcttggcttcaatactgacttagataaccaattcccctttttattcttcaaccagtattttattttacaccacggccttcaagccaatccccaatccatttacacctttatccctcttcttattatcggtttcgccaccctggtctacgtctttaggccaataaaaaagcatacacaagacggccaaactgcagaatcttatttaagggagctcatttttcctaaatcagcgatgaagtgggcttttattaccttatctatcttattgatcatagatactgttcaagtgatagacgccatagcaaatacgggtcaagcttcattacaagatgtcattgtcaggttagttaatggcagtcatgccaatatgccggatgccctatcctggatgcgcctcctcttaataatgatgacccctctctttatcattgggagtcaaaagaccctgttagaccgctatggcgaagcccatttcattatccgttatccgagtaaggccttattaaaagccaagaccatcctaacctattctcggtttttattagcctatgccctattttttgtcgttgcgctatctcttctttttattgggggttataggtcagcctcacaatcagcattccaagaactgttggatttttaccaagtgcctgcttctcccatccaagtttttattctcattctagtccttttacttgcccaattattttttgctttcctcatttacatcttgctatctgacttattgaatgaagtggtagccctattgatcatggtggttgtttcagccctcacagcctttgtcagtccgattaacatgatcctaataactagtggtttgtcatctctagtccagttactagcagtttccccaagctttttttacctcaacctcgctttaatctgcttagctataggaattttttatttaatacagataaggagcctcatcagatggaacaaataa

SEQ ID NO: 3242 - protein, 78 aa, Alloiococcus otitidis
MLSDLLNEVVALLIMVVVSALTAFVSPINMILITSGLSSLVQLLAVSPSFFYLNLALICLAIGIFYLIQIRSLIRWNK

SEQ ID NO: 3243 - DNA, 1575 bp, Alloiococcus otitidis; identical to SEQ ID NO: 3241
  CDS (544)..(1572)

SEQ ID NO: 3244 - protein, 343 aa, Alloiococcus otitidis
MNSHFGYRKLVTVTVVILILTYLGFNTDLDNQFPFLFFNQYFILHHGLQANPQSIYTFIPLLIIGFATLVYVFRPIKKHTQDGQTAESYLRELIFPKSAMKWAFITLSILLIIDTVQVIDAIANTGQASLQDVIVRLVNGSHANMPDALSWMRLLLIMMTPLFIIGSQKTLLDRYGEAHFIIRYPSKALLKAKTILTYSRFLLAYALFFVVALSLLFIGGYRSASQSAFQELLDFYQVPASPIQVFILILVLLLAQLFFAFLIYILLSDLLNEVVALLIMVVVSALTAFVSPINMILITSGLSSLVQLLAVSPSFFYLNLALICLAIGIFYLIQIRSLIRWNK

SEQ ID NO: 3245 - DNA, 1575 bp, Alloiococcus otitidis; identical to SEQ ID NO: 3241
  CDS (298)..(1572)

SEQ ID NO: 3246 - protein, 425 aa, Alloiococcus otitidis
MRLLACWLALYFGIHLMLSLVLATIFFPFSLSFEASLSSRNLDIMMFLEGFMALFSNPVFALLASFVYLIFGWLVLVSILSLVNSHFGYRKLVTVTVVILILTYLGFNTDLDNQFPFLFFNQYFILHHGLQANPQSIYTFIPLLIIGFATLVYVFRPIKKHTQDGQTAESYLRELIFPKSAMKWAFITLSILLIIDTVQVIDAIANTGQASLQDVIVRLVNGSHANMPDALSWMRLLLIMMTPLFIIGSQKTLLDRYGEAHFIIRYPSKALLKAKTILTYSRFLLAYALFFVVALSLLFIGGYRSASQSAFQELLDFYQVPASPIQVFILILVLLLAQLFFAFLIYILLSDLLNEVVALLIMVVVSALTAFVSPINMILITSGLSSLVQLLAVSPSFFYLNLALICLAIGIFYLIQIRSLIRWNK

SEQ ID NO: 3247 - DNA, 1575 bp, Alloiococcus otitidis; identical to SEQ ID NO: 3241
  CDS (145)..(1572)

SEQ ID NO: 3248 - protein, 476 aa, Alloiococcus otitidis
MEFALLNMADHYYLLNGVFPLLLLMLTRYFKQEREEEVIRFVYRRAQIRNEVRLLACWLALYFGIHLMLSLVLATIFFPFSLSFEASLSSRNLDIMMFLEGFMALFSNPVFALLASFVYLIFGWLVLVSILSLVNSHFGYRKLVTVTVVILILTYLGFNTDLDNQFPFLFFNQYFILHHGLQANPQSIYTFIPLLIIGFATLVYVFRPIKKHTQDGQTAESYLRELIFPKSAMKWAFITLSILLIIDTVQVIDAIANTGQASLQDVIVRLVNGSHANMPDALSWMRLLLIMMTPLFIIGSQKTLLDRYGEAHFIIRYPSKALLKAKTILTYSRFLLAYALFFVVALSLLFIGGYRSASQSAFQELLDFYQVPASPIQVFILILVLLLAQLFFAFLIYILLSDLLNEVVALLIMVVVSALTAFVSPINMILITSGLSSLVQLLAVSPSFFYLNLALICLAIGIFYLIQIRSLIRWNK

SEQ ID NO: 3249 - DNA, 1575 bp, Alloiococcus otitidis; identical to SEQ ID NO: 3241
  CDS (10)..(1572)

SEQ ID NO: 3250 - protein, 521 aa, Alloiococcus otitidis
MSPRFQSKFIEFYQVNKYLLLANVFVFCFFFVNNFSQGRVNGFHNMEFALLNMADHYYLLNGVFPLLLLMLTRYFKQEREEEVIRFVYRRAQIRNEVRLLACWLALYFGIHLMLSLVLATIFFPFSLSFEASLSSRNLDIMMFLEGFMALFSNPVFALLASFVYLIFGWLVLVSILSLVNSHFGYRKLVTVTVVILILTYLGFNTDLDNQFPFLFFNQYFILHHGLQANPQSIYTFIPLLIIGFATLVYVFRPIKKHTQDGQTAESYLRELIFPKSAMKWAFITLSILLIIDTVQVIDAIANTGQASLQDVIVRLVNGSHANMPDALSWMRLLLIMMTPLFIIGSQKTLLDRYGEAHFIIRYPSKALLKAKTILTYSRFLLAYALFFVVALSLLFIGGYRSASQSAFQELLDFYQVPASPIQVFILILVLLLAQLFFAFLIYILLSDLLNEVVALLIMVVVSALTAFVSPINMILITSGLSSLVQLLAVSPSFFYLNLALICLAIGIFYLIQIRSLIRWNK

SEQ ID NO: 3251 - DNA, 795 bp, Alloiococcus otitidis
  CDS (121)..(792)
tggtttgtcatctctagtccagttactagcagtttccccaagctttttttacctcaacctcgctttaatctgcttagctataggaattttttatttaatacagataaggagcctcatcagatggaacaaataaaactaagtcaagtgaaaaaaagttataaaaacaaagtcttgtaccaaaacgtcaatctttcaatccataaaggggactccatagccttagttggttcgaatgggtctggcaagagtgtcttgttcaaactcatcaccggtttagaaaagcctgatagtggggaggtttgggttgacaaccaagcgattggaagggatgtggactttccagaaggagttggtatcctggttaaccaacctggttatgtggaatattacagtggatttaagaaccttaaactcttagctgaaataaaaaaccagatagatgacgaccaaatcaaggaggcaatgaaccgggttggcctagacccagccaacaagaccatggtcagggaatattcaaccggaatgaagcaaaagttagggatctgccaggctattatggaagaccaagacattatcttacttgatgaaccctttaatgccctagactttcagaccaacaaggatattttaagactattgactgacttgaaggctgaaggaaagactatcctcttaacttcccaccaacattccttattggaacaagtctgtgacaagttttatatcatcatgaaccaagaagtcactgagatgtcagaccaactgaagaaagactattttaccctgctagcttag

SEQ ID NO: 3252 - protein, 224 aa, Alloiococcus otitidis
MEQIKLSQVKKSYKNKVLYQNVNLSIHKGDSIALVGSNGSGKSVLFKLITGLEKPDSGEVWVDNQAIGRDVDFPEGVGILVNQPGYVEYYSGFKNLKLLAEIKNQIDDDQIKEAMNRVGLDPANKTMVREYSTGMKQKLGICQAIMEDQDIILLDEPFNALDFQTNKDILRLLTDLKAEGKTILLTSHQHSLLEQVCDKFYIIMNQEVTEMSDQLKKDYFTLLA

SEQ ID NO: 3253 - DNA, 1245 bp, Alloiococcus otitidis; identical to SEQ ID NO: 835
  CDS (16)..(1242)

SEQ ID NO: 3254 - protein, 409 aa, Alloiococcus otitidis; identical to SEQ ID NO: 836

SEQ ID NO: 3255 - DNA, 738 bp, Alloiococcus otitidis
  CDS (13)..(735)
gaaggtgatttgatgaaaaacatattgaaggatgtgcatagcttataccacagtaagaagagtttaattatatttctattgctatttggggttgtgatggctcttgattcaatcgtcacaccacattatttggggatatttacagactacatggcaagcttccaatacacagaggtgccaatcattcttctgcaatggggattgctgctaatagtcattaatttaggctcgttattgttccaatactttgcaagtagaataaggcaagaaacgaataaagatcttaaagagatggtgtttctacaagcgtatttaccgggtaacgaaatagtcaataataatgaatatataacctctattcttcaagatgtaaagcaaattgagactagttttgttaattcatttataagttttgtttactgtatattgcaaggtttattggcactggtttttgttttgaatgtaaatatgcaagtggggcttgtttttattttactaggtttcattccaactatgatccctaaattgaccgaaaagtggttacaaactagtacaaataattggcaaatacaaaatcggttatatacacaagtaatggaagatgggttacacggtaagcagttaatcaaaagatttaatgcttcaaaattaatgtatagccgtgtccaaaataagttaattgaagagcaaaaagcttattttcaatggatttccgtcaaaaaacgtcttctttcttag

SEQ ID NO: 3256 - protein, 241 aa, Alloiococcus otitidis
MKNILKDVHSLYHSKKSLIIFLLLFGVVMALDSIVTPHYLGIFTDYMASFQYTEVPIILLQWGLLLIVINLGSLLFQYFASRIRQETNKDLKEMVFLQAYLPGNEIVNNNEYITSILQDVKQIETSFVNSFISFVYCILQGLLALVFVLNVNMQVGLVFILLGFIPTMIPKLTEKWLQTSTNNWQIQNRLYTQVMEDGLHGKQLIKRFNASKLMYSRVQNKLIEEQKAYFQWISVKKRLLS

SEQ ID NO: 3257 - DNA, 738 bp, Alloiococcus otitidis; identical to SEQ ID NO: 3255
  CDS (10)..(735)

SEQ ID NO: 3258 - protein, 242 aa, Alloiococcus otitidis
MMKNILKDVHSLYHSKKSLIIFLLLFGVVMALDSIVTPHYLGIFTDYMASFQYTEVPIILLQWGLLLIVINLGSLLFQYFASRIRQETNKDLKEMVFLQAYLPGNEIVNNNEYITSILQDVKQIETSFVNSFISFVYCILQGLLALVFVLNVNMQVGLVFILLGFIPTMIPKLTEKWLQTSTNNWQIQNRLYTQVMEDGLHGKQLIKRFNASKLMYSRVQNKLIEEQKAYFQWISVKKRLLS

SEQ ID NO: 3259 - DNA, 906 bp, Alloiococcus otitidis
  CDS (22)..(903)
agagcaaaaagcttattttcaatggatttccgtcaaaaaacgtcttctttcttagttggtctcttatataatattacagtcattttgtcgttagcatatggagcctttgttgttataaatggtagtttatctattggtgaactgataactgtctatatggctgccgatagggtggttagtccacttatttctttagcaacgatggtggcttcacacccattgttggataaaatactcaatcccaaccctattaggaacaggatatcacctccttctttcacaaaacaggatgcactgattgaattcaataatgcatctataggatatggtaataaattgttatcttccaacattaatttacaaattaatcatggagatcgcgtattaattcaaggtccaagtggatcagggaagtcaacgttgattaaagcattattaaatgaaattgaggtccttaaaggtcaaatattatacaatgaaagcttgagggatggtaatttgtataatcattttgctttagttgaacagaaaccttttatctttcaagatacgcttaggttcaatttaaccctaggacaagccattgatgatgatttgatacttaaagtgctaaatgaagttggcctagaaaaattggctagtgtttcggagctggataatgttatatcgtcagaaaataatcaactttctggaggagagacgaaacggttagaggttgctcggtcgctattatataataaaaaagtccttatcgttgatgaagctttgtcaggattagataatgatcgagctaaacaattaaatgaattgattgtaaattatccaggaacagttatcaatattgagcaccatattgatgacactattcggagtaaatataataaacaatacagcatacaaaattaa

SEQ ID NO: 3260 - protein, 294 aa, Alloiococcus otitidis
MDFRQKTSSFLVGLLYNITVILSLAYGAFVVINGSLSIGELITVYMAADRVVSPLISLATMVASHPLLDKILNPNPIRNRISPPSFTKQDALIEFNNASIGYGNKLLSSNINLQINHGDRVLIQGPSGSGKSTLIKALLNEIEVLKGQILYNESLRDGNLYNHFALVEQKPFIFQDTLRFNLTLGQAIDDDLILKVLNEVGLEKLASVSELDNVISSENNQLSGGETKRLEVARSLLYNKKVLIVDEALSGLDNDRAKQLNELIVNYPGTVINIEHHIDDTIRSKYNKQYSIQN

SEQ ID NO: 3261 - DNA, 315 bp, Alloiococcus otitidis
  CDS (13)..(312)
atgcaaaagtttatgaaaaatattatccataaaataaaggatagccgggcgtttaccctgctagagatggcgatcgtactttttattatttcagccttgctacttattattatccccaatattggttcacaccgagatacagcttcggagacggggaacaaggccttgcaaactgtagtggacacccaggccgacttgttcgaaatggaacagggtcgccggcctgctgatattgctgatttagaaagtgcctcctacttaacacaagcccaggccagccaagctcaagaggctggtataaagatttcacgttaa

SEQ ID NO: 3262 - protein, 100 aa, Alloiococcus otitidis
MKNIIHKIKDSRAFTLLEMAIVLFIISALLLIIIPNIGSHRDTASETGNKALQTVVDTQADLFEMEQGRRPADIADLESASYLTQAQASQAQEAGIKISR

SEQ ID NO: 3263 - DNA, 315 bp, Alloiococcus otitidis; identical to SEQ ID NO: 3261
  CDS (1)..(312)

SEQ ID NO: 3264 - protein, 104 aa, Alloiococcus otitidis
MQKFMKNIIHKIKDSRAFTLLEMAIVLFIISALLLIIIPNIGSHRDTASETGNKALQTVVDTQADLFEMEQGRRPADIADLESASYLTQAQASQAQEAGIKISR

SEQ ID NO: 3265 - DNA, 480 bp, Alloiococcus otitidis
  CDS (16)..(477)
agatttcacgttaagatgaaaactaggctaggccttgttggtcgagaagatggttttttgactttactggaagctatcctaactatggttattgttttgatttttcttatgctacccagcctcaatatagaacaagctaagttaggagtagagacagacctctttacggaaaatttaaggacccagattaccttgatgaaccaaaatgccgtcttaaagggagaaatgtcggtggtagaagtggaaccaggccgcaaccggatagttttctcagtgatgggccagccgcagtcccccttgaattcagttttaccagtgcctgatcatattaaagtttatggtggctacaagcgctatgcttttagggctcggtctggtaacatcaccaaggttaaccggtttgcctatacggatggcaaacggaggatagaattcgtttttcaaattggaagcgggcgattttatgttcgagaaagttaa

SEQ ID NO: 3266 - protein, 154 aa, Alloiococcus otitidis
MKTRLGLVGREDGFLTLLEAILTMVIVLIFLMLPSLNIEQAKLGVETDLFTENLRTQITLMNQNAVLKGEMSVVEVEPGRNRIVFSVMGQPQSPLNSVLPVPDHIKVYGGYKRYAFRARSGNITKVNRFAYTDGKRRIEFVFQIGSGRFYVRES

SEQ ID NO: 3267 - DNA, 342 bp, Alloiococcus otitidis
  CDS (112)..(339)
aattcgtttttcaaattggaagcgggcgattttatgttcgagaaagttaaaaatgaccaggcctttatcctcttggagagtatcctggccctaagtttggtatcttttactatgatacttgttttgccctttagcctgcaattgctccaggcacggcagaagcggcaaaacgaaattgaaggctaccggctcttatatgattacagttatgaatggttagggtcaagcgaccaatgggtgacccgaagtggggttgactaccgagtttcttaccaagaaaatgccctacaagttagcctgcccaaccaggatgaaatcgtcttagaagtggtggaaccatga

SEQ ID NO: 3268 - protein, 76 aa, Alloiococcus otitidis
MILVLPFSLQLLQARQKRQNEIEGYRLLYDYSYEWLGSSDQWVTRSGVDYRVSYQENALQVSLPNQDEIVLEVVEP

SEQ ID NO: 3269 - DNA, 342 bp, Alloiococcus otitidis; identical to SEQ ID NO: 3267
  CDS (34)..(339)

SEQ ID NO: 3270 - protein, 102 aa, Alloiococcus otitidis
MFEKVKNDQAFILLESILALSLVSFTMILVLPFSLQLLQARQKRQNEIEGYRLLYDYSYEWLGSSDQWVTRSGVDYRVSYQENALQVSLPNQDEIVLEVVEP

SEQ ID NO: 3271 - DNA, 342 bp, Alloiococcus otitidis; identical to SEQ ID NO: 3267
  CDS (16)..(339)

SEQ ID NO: 3272 - protein, 108 aa, Alloiococcus otitidis
MEAGDFMFEKVKNDQAFILLESILALSLVSFTMILVLPFSLQLLQARQKRQNEIEGYRLLYDYSYEWLGSSDQWVTRSGVDYRVSYQENALQVSLPNQDEIVLEVVEP

SEQ ID NO: 3273 - DNA, 483 bp, Alloiococcus otitidis
  CDS (25)..(480)
aatcgtcttagaagtggtggaaccatgaaatggcttaagaaggaagaggcttttaccatgcttgaagccttagtagccctgtcgattacctctctaatcttacttgccctgtcaataggggtcagccattttaagcaagttaaggaagaattacgggctgaccggcaacttgactggcacctttttgtcaatcaaatgtccttttatctggagtctagcgacctcttgtcggttaatcagaaccggctactagtcagagaggtcaactaccgggaccaaagtgtggtccaagcccaataccgcctcgttaacggcaactttattaggcgagtcaataatgggaaccagcccatgctactcgatgtcaagaaggtggaaatggaagaggagggccctagtcttatgatgaaagcctactttaaaaatgatgaagaataccaggctagaatttgggtgaaccagtggtatgatcaagaagattga

SEQ ID NO: 3274 - protein, 152 aa, Alloiococcus otitidis
MKWLKKEEAFTMLEALVALSITSLILLALSIGVSHFKQVKEELRADRQLDWHLFVNQMSFYLESSDLLSVNQNRLLVREVNYRDQSVVQAQYRLVNGNFIRRVNNGNQPMLLDVKKVEMEEEGPSLMMKAYFKNDEEYQARIWVNQWYDQED

SEQ ID NO: 3275 - DNA, 624 bp, Alloiococcus otitidis
  CDS (34)..(621)
accagtggtatgatcaagaagattgaaagtaaaatgaaaggggtcttaagagataaccaggcctctatcctggtctcctccttagtttttttaatggtcatttcctttttgttaagtggtttagggattatggttgtcagtgaatcacgccagcaagctatgattaaggacaactacctggccaaggctatgatccaaaaagcttactatataatgaaagaaatggatccatcagacctagcaaacttagcatctaagaccatttcctttaaccagggtcaggtggtggctagccaggatgaagagggtatcttttcctttacagctagcctagccaatgattaccagtacagtcagaccaaccggctttattttccagaccagttagatgaagagctagaggaggaagagggtgaagaaaaagaccacttggaaaatttagaagaggatagccatgaccaggttagtgaagatgaagaccaagttagtaaagatgaagaccaagaaagttcaagcagtcccaatccagactcgaaagaccaagaaagtcaatccggtgggccagaagaaagtaatccagtttctacaaagcttgaccaagaaaaggctagtccagacggttaa

SEQ ID NO: 3276 - protein, 196 aa, Alloiococcus otitidis
MKGVLRDNQASILVSSLVFLMVISFLLSGLGIMVVSESRQQAMIKDNYLAKAMIQKAYYIMKEMDPSDLANLASKTISFNQGQVVASQDEEGIFSFTASLANDYQYSQTNRLYFPDQLDEELEEEEGEEKDHLENLEEDSHDQVSEDEDQVSKDEDQESSSSPNPDSKDQESQSGGPEESNPVSTKLDQEKASPDG

SEQ ID NO: 3277 - DNA, 624 bp, Alloiococcus otitidis; identical to SEQ ID NO: 3275
  CDS (10)..(621)

SEQ ID NO: 3278 - protein, 204 aa, Alloiococcus otitidis
MIKKIESKMKGVLRDNQASILVSSLVFLMVISFLLSGLGIMVVSESRQQAMIKDNYLAKAMIQKAYYIMKEMDPSDLANLASKTISFNQGQVVASQDEEGIFSFTASLANDYQYSQTNRLYFPDQLDEELEEEEGEEKDHLENLEEDSHDQVSEDEDQVSKDEDQESSSSPNPDSKDQESQSGGPEESNPVSTKLDQEKASPDG

SEQ ID NO: 3279 - DNA, 1137 bp, Alloiococcus otitidis
  CDS (271)..(1134)
atcaacctttgctataatggaagagtgtataccactcttcttttttatacaagacgtgaaagtaaggatgataaaatgtcgagagtttcgaaagtacaagccaagctaatagaccaggacataggtggtttgctggtgactagtccctttaacttgagatacctgtctaattttaccgggacaaccggtcttagcttgattacccaagacaaggcttactttattactgattttagatatactgagcaggcccaagaccaagctagccacatgaccgttattgaacactcgggtgacatcattggccaagtaggagacctcctgagccaagatggaattcataatttagcctttgagaatgaccatgtcacttactccctctaccaggaaatgaaagaaaaattgccaagtgacctcaagcctggttctggtctggttgaaagactgcggatgattaaagaccctgaggagttggccactataagagaggccgttaagattaccgaggcagccttccgccatattctagattatatcgaagaagggatgacggaaatccaggtagctaatgagttggacttctttatgcgtagcaagggagcttccggtgtttctttcgacacgattgtggccagtggcaaacggtcagctatgcctcacggggttgccagtgacaagaaaattgaacggggtgacatgatcaccattgactttgggtgctattacaagggctacgcctctgatatgacccgaacttttgctttaggcgatcctggtgataagttgaaggaaatttatcaaattgtctatgaagccaaccgtttggcagcccaagcagctaaaccgggtatctctggggcagaactagataaggtagctcgagaccacattgcccaggcgggatacggcgaccaatttggccacactttaggccacagtatcggcttggatgttcacgaagacccggtcttaagcaaacgaaaccctgagcctttacaagccaatatggttgtcaccaacgaacctggcatttacttgcctggccttggtggggttcggattgaagacgacctcattatcactgaagacggcaatgaagaattgatgacggtgactagagaactcattatcttataa

SEQ ID NO: 3280 - protein, 288 aa, Alloiococcus otitidis
MTVIEHSGDIIGQVGDLLSQDGIHNLAFENDHVTYSLYQEMKEKLPSDLKPGSGLVERLRMIKDPEELATIREAVKITEAAFRHILDYIEEGMTEIQVANELDFFMRSKGASGVSFDTIVASGKRSAMPHGVASDKKIERGDMITIDFGCYYKGYASDMTRTFALGDPGDKLKEIYQIVYEANRLAAQAAKPGISGAELDKVARDHIAQAGYGDQFGHTLGHSIGLDVHEDPVLSKRNPEPLQANMVVTNEPGIYLPGLGGVRIEDDLIITEDGNEELMTVTRELIIL

SEQ ID NO: 3281 - DNA, 1137 bp, Alloiococcus otitidis; identical to SEQ ID NO: 3279
  CDS (76)..(1134)

SEQ ID NO: 3282 - protein, 353 aa, Alloiococcus otitidis
MSRVSKVQAKLIDQDIGGLLVTSPFNLRYLSNFTGTTGLSLITQDKAYFITDFRYTEQAQDQASHMTVIEHSGDIIGQVGDLLSQDGIHNLAFENDHVTYSLYQEMKEKLPSDLKPGSGLVERLRMIKDPEELATIREAVKITEAAFRHILDYIEEGMTEIQVANELDFFMRSKGASGVSFDTIVASGKRSAMPHGVASDKKIERGDMITIDFGCYYKGYASDMTRTFALGDPGDKLKEIYQIVYEANRLAAQAAKPGISGAELDKVARDHIAQAGYGDQFGHTLGHSIGLDVHEDPVLSKRNPEPLQANMVVTNEPGIYLPGLGGVRIEDDLIITEDGNEELMTVTRELIIL

SEQ ID NO: 3283 - DNA, 1137 bp, Alloiococcus otitidis; identical to SEQ ID NO: 3279
  CDS (25)..(1134)

SEQ ID NO: 3284 - protein, 370 aa, Alloiococcus otitidis
MYTTLLFYTRRESKDDKMSRVSKVQAKLIDQDIGGLLVTSPFNLRYLSNFTGTTGLSLITQDKAYFITDFRYTEQAQDQASHMTVIEHSGDIIGQVGDLLSQDGIHNLAFENDHVTYSLYQEMKEKLPSDLKPGSGLVERLRMIKDPEELATIREAVKITEAAFRHILDYIEEGMTEIQVANELDFFMRSKGASGVSFDTIVASGKRSAMPHGVASDKKIERGDMITIDFGCYYKGYASDMTRTFALGDPGDKLKEIYQIVYEANRLAAQAAKPGISGAELDKVARDHIAQAGYGDQFGHTLGHSIGLDVHEDPVLSKRNPEPLQANMVVTNEPGIYLPGLGGVRIEDDLIITEDGNEELMTVTRELIIL

SEQ ID NO: 3285 - DNA, 576 bp, Alloiococcus otitidis
  CDS (19)..(573)
ttaggagaatgtttagcaatgatttcaaccaatgaatttaaaaatggtatgaccattcaatatgataagggcttgtggaagatcttggacttccaacacgttaagccaggtaaggggcaagcctttgtccggtccaaattaaaaaacttgcggacgggagcgacccaagaaatcacctttaaggcgggtgacaaggttgaacaagccatgattgaaagtaagaccatgcagtacctctacgacaatgggggcatgcatgtctttatggatacggaaaactacgaccaggtcgaaattccagagcagttgatcgaggaagagcttaaattcttaaaagagaatactcaagtggacattatcttctttgaatctgaagtcctaggactagacctaccaaacaaggtagagctggaagtgacagagaccactcctaacatcagtggggacacccaaggaggcgggtctaagccagctacccttgaaacaggggcggttatcacagttcctctcttcatcaacaaaggagacatccttgttgtcaatactgatgacggctcttacaactcccgtgcctaa

SEQ ID NO: 3286 - protein, 185 aa, Alloiococcus otitidis
MISTNEFKNGMTIQYDKGLWKILDFQHVKPGKGQAFVRSKLKNLRTGATQEITFKAGDKVEQAMIESKTMQYLYDNGGMHVFMDTENYDQVEIPEQLIEEELKFLKENTQVDIIFFESEVLGLDLPNKVELEVTETTPNISGDTQGGGSKPATLETGAVITVPLFINKGDILVVNTDDGSYNSRA

SEQ ID NO: 3287 - DNA, 459 bp, Alloiococcus otitidis
  CDS (52)..(456)
cggctcttacaactcccgtgcctaaggaaggaatctgaggaggttattcatatggaaaatatacaagggactcgatcaagccggcaatctgctggagcaattgaaatagcaccagaagttttggaagttatctcccacattgcagccaacgaagtagaaggggtctttgccttaaaaggaaatttctctgctgatgtgaaacgtttgtttggtcaatcttactacaaaaatggggtggctttgacccatgaccaagatggcatcagcctggatatttactgcaatctcacttatggtgtgaatgtgccgaaggtagctttggaaatccaaaaaagagtcaaagaccaagtttaccaaatggctgatatcaacctggctgaagtgaatgttcatgtggtctctattgtgaccgaaaatcaaatcaaaaagtctaaggctggagctttaaaggatgactaa

SEQ ID NO: 3288 - protein, 135 aa, Alloiococcus otitidis
MENIQGTRSSRQSAGAIEIAPEVLEVISHIAANEVEGVFALKGNFSADVKRLFGQSYYKNGVALTHDQDGISLDIYCNLTYGVNVPKVALEIQKRVKDQVYQMADINLAEVNVHVVSIVTENQIKKSKAGALKDD

SEQ ID NO: 3289 - DNA, 504 bp, Alloiococcus otitidis
  CDS (4)..(501)
aggatgactaagccacttgctgtccggagtattgtccgggaaaaagcctatcaaagcctttacctcaaggcgagccggccccaagtttccttggaccaggccttgattcaggttttggctagccagggagaagcaagtgaccaagccagtttaggggacctggtccaagcgaacttgccagaagaataccagactaaagctattgtccaggatgccttggattatttgctgaccttaactgccggggtcttggaccatgaagaatatttggacaagcagattggcccccagctaaaaaaacggagcttaaaccgacttgaccaaaccgaccacgtcatcttgcaagttgcgagttatgaacttctcttccaagaggacctggcccctagtgtggttattgatgaagccatagagctagccaagcgttttaatgatgacaagtccagcaaatttatcaatggggtcttgcaggccattttagacagcaaggaagcaggcaaataa

SEQ ID NO: 3290 - protein, 166 aa, Alloiococcus otitidis
MTKPLAVRSIVREKAYQSLYLKASRPQVSLDQALIQVLASQGEASDQASLGDLVQANLPEEYQTKAIVQDALDYLLTLTAGVLDHEEYLDKQIGPQLKKRSLNRLDQTDHVILQVASYELLFQEDLAPSVVIDEAIELAKRFNDDKSSKFINGVLQAILDSKEAGK

SEQ ID NO: 3291 - DNA, 1377 bp, Alloiococcus otitidis
  CDS (241)..(1374)
aagggtggtcatgtggattacgagtacttaacggtcagccaattaagtcaatacatcaaacggaaatttgaccaggacccctatctagggacggtctacattaagggtgaggtttctaattcagggcggaataggcctaatgccaaccaatacttcagcttaaaagatgaccagaatgtcatttctgttgtccttttcagggacgtggctaaaagggtcaagttcaagcttgaagacgggatgagtgttttgatccaaggacgggtggctacctatggcccgcgggggatctaccaaatagtggttagtgacatccagccagatggtgtaggggccctctaccaagctttagaacagaccaaaaaagctctagcaaaggaaggcttgtttaggtcagaccacaaaaagcccctggttaaattccccaagcggatagcagcggtcactagtgagagcggggctgtcatccaggacattaaaacgaccctagagagacgctatccccttgttgaactggtcttattcccgactagagtccaaggcaagtcagctatttcttctatcgttaaaaatatccgcagggcggatgaatctgccagctttgatacgattatagttggacggggtggtggatccatcgaagacttgtggggttttaacgatgagaaggttgtccgggccatttaccaagcccaaacacccattatttcttccgtcggtcacgaaacggacactagcctgtctgacttggcagcagatgtccgggcagccactccaacagctgcagctgaacttgctgttccattattcagtgatatcaacaaccaaattttagaatatacccgccttttacaccaccatgcccgccgcctggtcgaaaaccgtcgccaggctctggaccgcgttaataagtcttatatcttcaagcaacccaaccgcttatatgaaggctatattcaaaatattgaccacttaaccagtggcctttatcgaagtttccgtcagatattagctcattacaagcgggcaatagatgaaatagaccagaccatcaatcctgaccgtttccaaaaatatatcctatccttgaagctcagaagccagtcacttaaaaaccagttagaccagaatatgaaggatatccaggaccaaaaacaccgggaactagcccaattaacccaagccttagaccacctgtcaccacttgagatattgagccggggttatgcctatgctagccaggaagggcaagttctcagaagtgttgaccaggcaagtaaggaccaaaatctaaccgttagattagctgacggccaactagaaaccaagatcctaagcatcaggaaagagaaaggggcagacaaacatgaccaatga

SEQ ID NO: 3292 - protein, 378 aa, Alloiococcus otitidis
MSVLIQGRVATYGPRGIYQIVVSDIQPDGVGALYQALEQTKKALAKEGLFRSDHKKPLVKFPKRIAAVTSESGAVIQDIKTTLERRYPLVELVLFPTRVQGKSAISSIVKNIRRADESASFDTIIVGRGGGSIEDLWGFNDEKVVRAIYQAQTPIISSVGHETDTSLSDLAADVRAATPTAAAELAVPLFSDINNQILEYTRLLHHHARRLVENRRQALDRVNKSYIFKQPNRLYEGYIQNIDHLTSGLYRSFRQILAHYKRAIDEIDQTINPDRFQKYILSLKLRSQSLKNQLDQNMKDIQDQKHRELAQLTQALDHLSPLEILSRGYAYASQEGQVLRSVDQASKDQNLTVRLADGQLETKILSIRKEKGADKHDQ

SEQ ID NO: 3293 - DNA, 1377 bp, Alloiococcus otitidis; identical to SEQ ID NO: 3291
  CDS (13)..(1374)

SEQ ID NO: 3294 - protein, 454 aa, Alloiococcus otitidis
MDYEYLTVSQLSQYIKRKFDQDPYLGTVYIKGEVSNSGRNRPNANQYFSLKDDQNVISVVLFRDVAKRVKFKLEDGMSVLIQGRVATYGPRGIYQIVVSDIQPDGVGALYQALEQTKKALAKEGLFRSDHKKPLVKFPKRIAAVTSESGAVIQDIKTTLERRYPLVELVLFPTRVQGKSAISSIVKNIRRADESASFDTIIVGRGGGSIEDLWGFNDEKVVRAIYQAQTPIISSVGHETDTSLSDLAADVRAATPTAAAELAVPLFSDINNQILEYTRLLHHHARRLVENRRQALDRVNKSYIFKQPNRLYEGYIQNIDHLTSGLYRSFRQILAHYKRAIDEIDQTINPDRFQKYILSLKLRSQSLKNQLDQNMKDIQDQKHRELAQLTQALDHLSPLEILSRGYAYASQEGQVLRSVDQASKDQNLTVRLADGQLETKILSIRKEKGADKHDQ

SEQ ID NO: 3295 - DNA, 300 bp, Alloiococcus otitidis
  CDS (31)..(297)
gcatcaggaaagagaaaggggcagacaaacatgaccaatgaaaatcagccgcaagatctccaggaagccaaaagtcgaaaggatttggactttgaagcctcccttaaagagttagagaaaattgttgaccggcttgagcagggggatgtccccctagaagaagccttggacaagttccaagaaggcattaagctgagtcggaaactaaagcaagaactagaccaagctgaccaattgctctttgaagtcatgaaggaagaccagggggaagatgaagcagacttagaggagaaggaatag

SEQ ID NO: 3296 - protein, 89 aa, Alloiococcus otitidis
MTNENQPQDLQEAKSRKDLDFEASLKELEKIVDRLEQGDVPLEEALDKFQEGIKLSRKLKQELDQADQLLFEVMKEDQGEDEADLEEKE

SEQ ID NO: 3297 - DNA, 903 bp, Alloiococcus otitidis
  CDS (109)..(900)
gaggatcaaatggattttaccacttttaaggaccgggaaagcctatcctttgaggcctacttagaaggacttttatctcatttaggcaaaacggccctgcgagaagccatggcctactccttttatgcacctggcaaacgaatccggccacttttgcttttagcctgcttggcctcttttggctttaacccccagctaggctatcctgctgctggggcagtcgaattaatccatacctattctttaatccatgacgatttacctgccatggatgatgatgatataagaagggggcaggccagtaaccataaaaagtatggggaagggctagccatcttggcgggagatggtttattgaccctggcctttgagcttatcttatcgactccggttagtgatccgaccaagattaaattgacccagctcttgagtcaaacggctggtcctagtggcatggttttaggccaggctttagacttggctggcgaaggggaagacctctctcttgaccaagtctcggacatccatgccaaaaagaccgggcaactcttgcgttttaccctggagggggccggactgatcgctcaaaaagacccaaatacctgccagcttttaggtaaattgggactggaagcgggtttagcctaccaggtccgggatgatatcttggacctgaccgctagttctagtgacttaggcaagcctagggggtcagaccaagacttaagcaagtcgacttaccctagcttacttggtatccaaggggccaaagaccagctggctcagtctttgcattcttgcttagaactattgaaagaaattgaaaaggccagtcattttgacaagtccatcttagaaagttttatcttaagcttaaacctagaaggtgactgggatggctaa

SEQ ID NO: 3298 - protein, 264 aa, Alloiococcus otitidis
MAYSFYAPGKRIRPLLLLACLASFGFNPQLGYPAAGAVELIHTYSLIHDDLPAMDDDDIRRGQASNHKKYGEGLAILAGDGLLTLAFELILSTPVSDPTKIKLTQLLSQTAGPSGMVLGQALDLAGEGEDLSLDQVSDIHAKKTGQLLRFTLEGAGLIAQKDPNTCQLLGKLGLEAGLAYQVRDDILDLTASSSDLGKPRGSDQDLSKSTYPSLLGIQGAKDQLAQSLHSCLELLKEIEKASHFDKSILESFILSLNLEGDWDG

SEQ ID NO: 3299 - DNA, 903 bp, Alloiococcus otitidis; identical to SEQ ID NO: 3297
  CDS (10)..(900)

SEQ ID NO: 3300 - protein, 297 aa, Alloiococcus otitidis
MDFTTFKDRESLSFEAYLEGLLSHLGKTALREAMAYSFYAPGKRIRPLLLLACLASFGFNPQLGYPAAGAVELIHTYSLIHDDLPAMDDDDIRRGQASNHKKYGEGLAILAGDGLLTLAFELILSTPVSDPTKIKLTQLLSQTAGPSGMVLGQALDLAGEGEDLSLDQVSDIHAKKTGQLLRFTLEGAGLIAQKDPNTCQLLGKLGLEAGLAYQVRDDILDLTASSSDLGKPRGSDQDLSKSTYPSLLGIQGAKDQLAQSLHSCLELLKEIEKASHFDKSILESFILSLNLEGDWDG

SEQ ID NO: 3301 - DNA, 819 bp, Alloiococcus otitidis
  CDS (13)..(816)
aaggtgactgggatggctaagaagatccgggcagaccaagccatgttagaccaagacctcctggacgacctcaaggaggcccaagcccttatcatggcgggtcgggtgtataccgtaaaagaaagccaagtcccaactcctggctaccaggtcaaagaaggaacccagctttatatcaaaagccccgaccacccctatgtcagccgaggtggactcaagctcaagcaggctattgacagctttgacttagactttgcgggtaaaattatcctagacattgggtcttcaacaggggggtttacggatgtggccttaaggcatggggcaggactggtttatgccctggatgtgggaaccaaccagcttgtctggtccttgcgccaggacgaccgggtcattgtaatggaacagaccaattttaaggactgcaagttaagtgactttcgagcgggccaacccgatctagctgtgatggatgtgtcttttatatccttatatcccattttagaaaacttggcccagatcttgccgcctggtcacttggcagttgccttgatcaagccccagtttgaagctgacaaggaagatgtccaaccgggtggcctggtattggatccaggagtccaccgcaaggtactggaggctacgaccgcctttatgactaagctccactactgcctccttggcctcctagcttcacccatcaaggggggcaaggggaatattgagttcatcgccctcctccgtaatgccagtgaccaagaccaggaaattcaacccatgattgaccaggccattgaccagtctttagacctctaa

SEQ ID NO: 3302 - protein, 268 aa, Alloiococcus otitidis
MAKKIRADQAMLDQDLLDDLKEAQALIMAGRVYTVKESQVPTPGYQVKEGTQLYIKSPDHPYVSRGGLKLKQAIDSFDLDFAGKIILDIGSSTGGFTDVALRHGAGLVYALDVGTNQLVWSLRQDDRVIVMEQTNFKDCKLSDFRAGQPDLAVMDVSFISLYPILENLAQILPPGHLAVALIKPQFEADKEDVQPGGLVLDPGVHRKVLEATTAFMTKLHYCLLGLLASPIKGGKGNIEFIALLRNASDQDQEIQPMIDQAIDQSLDL

SEQ ID NO: 3303 - DNA, 819 bp, Alloiococcus otitidis; identical to SEQ ID NO: 3301
  CDS (4)..(816)

SEQ ID NO: 3304 - protein, 271 aa, Alloiococcus otitidis
MTGMAKKIRADQAMLDQDLLDDLKEAQALIMAGRVYTVKESQVPTPGYQVKEGTQLYIKSPDHPYVSRGGLKLKQAIDSFDLDFAGKIILDIGSSTGGFTDVALRHGAGLVYALDVGTNQLVWSLRQDDRVIVMEQTNFKDCKLSDFRAGQPDLAVMDVSFISLYPILENLAQILPPGHLAVALIKPQFEADKEDVQPGGLVLDPGVHRKVLEATTAFMTKLHYCLLGLLASPIKGGKGNIEFIALLRNASDQDQEIQPMIDQAIDQSLDL

SEQ ID NO: 3305 - DNA, 1794 bp, Alloiococcus otitidis
  CDS (115)..(1791)
agaattttcccaagatctgggttaagacttgaaggagagtttgcaaataatataataaggtctaagctctttcgccagatctcgttgacaagcaagctagtcaggaggaatgtcatgcttcaagacttgcatattaaagattttgctatcattgaggaagtggatctgaatttctatgatgggatgacggtcttaaccggagaaactggggccggcaagtccattatcattgatgcggttggtctcttggctggtggtcgtggctcggcagaatttgtccgccacggggctaaaaagtgccaactagaaggtgaatttttggtcctaaacccggataaattcacccccatcttggaccaatttggcatcagcttagaagacaatattctattgatccagcgggaaatttttgccagtggccggaatgtttgccgggtcaatgggtctatggtcactgtggctaatttaaaagaaatcgcttccaacttgattgatatccatggccaaaatgagcaccaagagctcatgcaggcggaccagcacattgagctattggataattacgctggtgaagcaatcaaggacttgaagcaagtcttccaggccaagcgggaagaatacctaaaagttaaaaaaagactccagcaatggcaggccaatgaaaaagagtatgcccaacggattgacatgttggaatttcaagtcaaggaaattgaggctgtcaacttggaagaaggagaggatgaggcattggaagctgaatcccgcaagctagccaacttccacaagatttcccagtctctccaattaagctatgatgccttgcaggcttctgaaggcaatgccgtggaaaaattaggaatggccatggaagagatgtccgatattgcatcggtcaacaaggactacgaagttatatcggataccctatcgtcacttttttaccaggtccaagagactagttccgatattttaaatgagctggaccagatggaatttgatgaaggccgtctgtatgaaattgaagaccggctcaagtcgatccaagagctgaaacggaagtatggggacaccattagtgaagtcttgacctattaccacaatgcttcagaagagctctataatttaaaacataatgaaggcaatatcgaccaggttcaaaaccaggtcgacagtttggaagctgacctggtcgacctgggtcaaaaactccaccaggtccgccaagaccaggcggagcaattggagcaagctgtccttgaccaactagcagagctctacatggacaaggcccgattttcggttgaatttaaaaaaccggcccagctggagaatatgaatgccaatggttttgacactctggccttttatatttcgaccaatccgggagagcctttgaagcccctcaacaaggtagcttctggtggggaattgtcccggatgatgttagccatgaagacgattttttctagttcccaaggtattacctctattatctttgatgaggtggacacgggggtctctggtcgggtagcctcggcgattgccaaaaaaatccacggggtttcggaccagtcccaagtcttatgcattacccacctgcctcaagttgcggcgattgccgatgaacacctctacatcaacaaacaaatagtaggggaccggaccaagacccaagtgagtcatttgtctgaagaagaccgggtggaagaaattgcccgtatgctgtctggagaccaaaccacgccagctagtctgtctgcagcccgggaattactcaaaaaaggcctttag

SEQ ID NO: 3306 - protein, 559 aa, Alloiococcus otitidis
MLQDLHIKDFAIIEEVDLNFYDGMTVLTGETGAGKSIIIDAVGLLAGGRGSAEFVRHGAKKCQLEGEFLVLNPDKFTPILDQFGISLEDNILLIQREIFASGRNVCRVNGSMVTVANLKEIASNLIDIHGQNEHQELMQADQHIELLDNYAGEAIKDLKQVFQAKREEYLKVKKRLQQWQANEKEYAQRIDMLEFQVKEIEAVNLEEGEDEALEAESRKLANFHKISQSLQLSYDALQASEGNAVEKLGMAMEEMSDIASVNKDYEVISDTLSSLFYQVQETSSDILNELDQMEFDEGRLYEIEDRLKSIQELKRKYGDTISEVLTYYHNASEELYNLKHNEGNIDQVQNQVDSLEADLVDLGQKLHQVRQDQAEQLEQAVLDQLAELYMDKARFSVEFKKPAQLENMNANGFDTLAFYISTNPGEPLKPLNKVASGGELSRMMLAMKTIFSSSQGITSIIFDEVDTGVSGRVASAIAKKIHGVSDQSQVLCITHLPQVAAIADEHLYINKQIVGDRTKTQVSHLSEEDRVEEIARMLSGDQTTPASLSAARELLKKGL

SEQ ID NO: 3307 - DNA, 1794 bp, Alloiococcus otitidis; identical to SEQ ID NO: 3305
  CDS (85)..(1791)

SEQ ID NO: 3308 - protein, 569 aa, Alloiococcus otitidis
MTSKLVRRNVMLQDLHIKDFAIIEEVDLNFYDGMTVLTGETGAGKSIIIDAVGLLAGGRGSAEFVRHGAKKCQLEGEFLVLNPDKFTPILDQFGISLEDNILLIQREIFASGRNVCRVNGSMVTVANLKEIASNLIDIHGQNEHQELMQADQHIELLDNYAGEAIKDLKQVFQAKREEYLKVKKRLQQWQANEKEYAQRIDMLEFQVKEIEAVNLEEGEDEALEAESRKLANFHKISQSLQLSYDALQASEGNAVEKLGMAMEEMSDIASVNKDYEVISDTLSSLFYQVQETSSDILNELDQMEFDEGRLYEIEDRLKSIQELKRKYGDTISEVLTYYHNASEELYNLKHNEGNIDQVQNQVDSLEADLVDLGQKLHQVRQDQAEQLEQAVLDQLAELYMDKARFSVEFKKPAQLENMNANGFDTLAFYISTNPGEPLKPLNKVASGGELSRMMLAMKTIFSSSQGITSIIFDEVDTGVSGRVASAIAKKIHGVSDQSQVLCITHLPQVAAIADEHLYINKQIVGDRTKTQVSHLSEEDRVEEIARMLSGDQTTPASLSAARELLKKGL

SEQ ID NO: 3309 - DNA, 1533 bp, Alloiococcus otitidis
  CDS (121)..(1530)
caagggaaagaaaaattgctaagcttttggatcttatttataataaagaagagtctaaatacgaaagcaatcttgagaggagaagatgatttggacaaacaagaatttggtgtgattgggatggcagtgatgggacggaacctggccttgaatgtggagagcaagggttattccgtttccatttataaccggtctgactacaagacccgggctgtcaaagaccagttccctgaccggaatatccaagcgacttatactatcgaagattttgttgattcactcgaaaaaccccgtcgaatcatgttgatggtcaaggctggctatgccactgatgcaaccattgaatccttgctcccacacctggaccagggtgatatcttgattgatggggggaataccaactaccaagataccatgagaagaagcaaggaattaagccaggcagggattaactttatcggaactggggtttccggtggcgaggaaggcgccttaaaaggaccctcgatcatgccaggaggccaaaaagaagcttacgacctggtcgcaccaatcttggaagatattgcagccaaggccccatctgatggccagccttgtgtgacctatatcgggcctgacggtgctggtcattatgtcaagatggttcacaatgggattgaatacggggacatgcagctgattgccgagtcttatactattatgaaagactatttgggcatgaccaatgaagaaatggcccaaactttcaaagaatggaatgaaggagaattggactccttcttaattgaattaactgctgatgccctgaccaagaaggacccgggaagcggagaatacatggtagatgtgatcctagaccgggcaggaaacaagggaaccggtaagtggacctcccagtccgccctcgacctaggccaacccttacctttgattactgaatccgtcttcgcccgctatatttcggccttcaaagaagagcggtcggctgccgcccaaatcttgcctaagcctgaagccagtcaatttacgggcgacaaggctgacttattggaaaaactccgccaggccctctacttcagcaagatcatgagttacgcccaaggattttcccaaatggctaatgcctcccaggaatacggctgggacctgcatttaggtgaaattgccaaaatattccgggcgggttgcattatccgggcccggttcttagaagacatcacacaagcctatgacaatcaggaagatctaaagaaccttatcttggatgactactttaaagacattgtctctgcctaccagcctgcccttcgtcaaattgtaggccatgctgtccaagctggcatcccaattccagccttttcatccgcgattgcctactacgatagctaccggtctgaacgattgtcagccaatatcatccaagcccaaagggactactttggggcccacacctatgagagagtggacaagccaggtcattaccactttgattggtatggggaccagggggaagtagtcgctgacgactag

SEQ ID NO: 3310 - protein, 470 aa, Alloiococcus otitidis
MAVMGRNLALNVESKGYSVSIYNRSDYKTRAVKDQFPDRNIQATYTIEDFVDSLEKPRRIMLMVKAGYATDATIESLLPHLDQGDILIDGGNTNYQDTMRRSKELSQAGINFIGTGVSGGEEGALKGPSIMPGGQKEAYDLVAPILEDIAAKAPSDGQPCVTYIGPDGAGHYVKMVHNGIEYGDMQLIAESYTIMKDYLGMTNEEMAQTFKEWNEGELDSFLIELTADALTKKDPGSGEYMVDVILDRAGNKGTGKWTSQSALDLGQPLPLITESVFARYISAFKEERSAAAQILPKPEASQFTGDKADLLEKLRQALYFSKIMSYAQGFSQMANASQEYGWDLHLGEIAKIFRAGCIIRARFLEDITQAYDNQEDLKNLILDDYFKDIVSAYQPALRQIVGHAVQAGIPIPAFSSAIAYYDSYRSERLSANIIQAQRDYFGAHTYERVDKPGHYHFDWYGDQGEVVADD

SEQ ID NO: 3311 - DNA, 1533 bp, Alloiococcus otitidis; identical to SEQ ID NO: 3309
  CDS (112)..(1530)

SEQ ID NO: 3312 - protein, 473 aa, Alloiococcus otitidis
MIGMAVMGRNLALNVESKGYSVSIYNRSDYKTRAVKDQFPDRNIQATYTIEDFVDSLEKPRRIMLMVKAGYATDATIESLLPHLDQGDILIDGGNTNYQDTMRRSKELSQAGINFIGTGVSGGEEGALKGPSIMPGGQKEAYDLVAPILEDIAAKAPSDGQPCVTYIGPDGAGHYVKMVHNGIEYGDMQLIAESYTIMKDYLGMTNEEMAQTFKEWNEGELDSFLIELTADALTKKDPGSGEYMVDVILDRAGNKGTGKWTSQSALDLGQPLPLITESVFARYISAFKEERSAAAQILPKPEASQFTGDKADLLEKLRQALYFSKIMSYAQGFSQMANASQEYGWDLHLGEIAKIFRAGCIIRARFLEDITQAYDNQEDLKNLILDDYFKDIVSAYQPALRQIVGHAVQAGIPIPAFSSAIAYYDSYRSERLSANIIQAQRDYFGAHTYERVDKPGHYHFDWYGDQGEVVADD

SEQ ID NO: 3313 - DNA, 1533 bp, Alloiococcus otitidis; identical to SEQ ID NO: 3309
  CDS (16)..(1530)

SEQ ID NO: 3314 - protein, 505 aa, Alloiococcus otitidis
MLSFWILFIIKKSLNTKAILRGEDDLDKQEFGVIGMAVMGRNLALNVESKGYSVSIYNRSDYKTRAVKDQFPDRNIQATYTIEDFVDSLEKPRRIMLMVKAGYATDATIESLLPHLDQGDILIDGGNTNYQDTMRRSKELSQAGINFIGTGVSGGEEGALKGPSIMPGGQKEAYDLVAPILEDIAAKAPSDGQPCVTYIGPDGAGHYVKMVHNGIEYGDMQLIAESYTIMKDYLGMTNEEMAQTFKEWNEGELDSFLIELTADALTKKDPGSGEYMVDVILDRAGNKGTGKWTSQSALDLGQPLPLITESVFARYISAFKEERSAAAQILPKPEASQFTGDKADLLEKLRQALYFSKIMSYAQGFSQMANASQEYGWDLHLGEIAKIFRAGCIIRARFLEDITQAYDNQEDLKNLILDDYFKDIVSAYQPALRQIVGHAVQAGIPIPAFSSAIAYYDSYRSERLSANIIQAQRDYFGAHTYERVDKPGHYHFDWYGDQGEVVADD

SEQ ID NO: 3315 - DNA, 705 bp, Alloiococcus otitidis
  CDS (16)..(702)
tataggagtagagtaatgaaaaaagtattaatcattgaagacgaaaaaaacttggctcgttttgttgagttggaactcaagcacgagggctttgccccaaccgtgaaatttgatgggcggtctggcttgcaagcagctctcaatggagaagattgggatgttatcttgctagacttgatgttgccggaattaaacgggattgacgtggctcgccgggtccgtcaggtcagcgaggttcccattattatgatgaccgcccgtgactctgttattgaccgggtttctggctttgaccacggggcagacgactacttggtcaagccctttgccattgaagaattattagcccggatgcgggcacttttccgccgtatagacatcgagtcttccatccaagaaaagcaaaagactatcttggaataccgggacttggtggttgagaaagaaaatcggattgtccgccgcgatgatgaagtcattgaactcaccaagcgggaatacgaacttttggttgaactgatggaaaatgtggacgtggttttatcccgggaaaaactattgaatgaagtttggggctatgaatcggacattgaaaccaatgtcgtcgatgtttatatccgctaccttcgaaacaagattgaccgtccaactggcgaaagttatattcaaacggttcgaggtaccggttatgtgatgcggacatga

SEQ ID NO: 3316 - protein, 229 aa, Alloiococcus otitidis
MKKVLIIEDEKNLARFVELELKHEGFAPTVKFDGRSGLQAALNGEDWDVILLDLMLPELNGIDVARRVRQVSEVPIIMMTARDSVIDRVSGFDHGADDYLVKPFAIEELLARMRALFRRIDIESSIQEKQKTILEYRDLVVEKENRIVRRDDEVIELTKREYELLVELMENVDVVLSREKLLNEVWGYESDIETNVVDVYIRYLRNKIDRPTGESYIQTVRGTGYVMRT

SEQ ID NO: 3317 - DNA, 1581 bp, Alloiococcus otitidis
  CDS (589)..(1578)
ccgtccaactggcgaaagttatattcaaacggttcgaggtaccggttatgtgatgcggacatgaatctaaaggggagagggctgaatatcgagcgactctctattaagtggaaatggtcccttatcatttcggcaacgatcatttttgtctatctgatttttgctatgctggtttattattcgacccagcaggtggtcttagacaaggaaagccaggaaatcgaaattgccatggggaatgccgaggaggtcttaaagcccctccaggaagaagtgaccgaggaaaatattgaagacctggtcaaagaccagcaagtggcggtgaacacctttagggatcggtatgaccaagcagactcccggtctggagatagggagggggccatctccaagctgagcttacgcttgttcgatttagatggcaaagaagtctacgccattggtgccaatgactaccccttccaggtgaccaataagtttatcctccgccccgtcagtgatgaccctaatttttccttgatgggggtcaagcccttggtgtcagagaccagtcaggaaagaatcggttatattcaaattatcaataatttggccagcttccaccatgtgattagccagataatctctagcattttctttatcggccttttagtggttgtcctcagtgtctttttaggcctctttatttctgaccgctttttgagccctatccggcgcttaaaaaatgccatggctgggatcatcaaggagccggaatcagaaaaacgcttgaaagtagcaggttcagatgaattggctgaattagccagcatctacaaccagatgattgaccggatgcaaaagaacattgacagtcaaaagcaatttgttgaagatgtctcccatgaattaaggacaccagtagctatcgtggaaggccacttaaacttattggagcgttggggcaaggatgaccctgagatcttagaagagtccatccaagcttccgtccaagaaatttcacggatgaaaagcctggtccaagaaatgctggacttgtctcgggctgtccaagtagatatccagtacaaggatgagcggactgatgtcaagcagttggtctctcaacttcacaataacttccaattggttcatgaagactttacttttaacctggatattgatgtggaaggggaagccattgtcaatatgtaccgcaaccatttagagcaggttttgatcatcctcttagacaatgccgtcaaatactccaaggaccgtaaggaagtccacctgtctttggcgaccagtggcgaccgggtccaaatagccgtccaagactttggtgaaggcatcagtgaagaagatagccagaagatctttaaccgcttctaccgggtggacaaggctagaagccgggaaaaaggcgggaatggtttgggtctgtccatagccaaacaattgatcaatggttacggcggcactatttcggtcgacagtgtccccggccgcgggtccgtcttccgtattgaattaaaactccttcaaaaccaggctaaagaccaagactccactgattcaaaggggcagaaaaaagaataa

SEQ ID NO: 3318 - protein, 330 aa, Alloiococcus otitidis
MASFHHVISQIISSIFFIGLLVVVLSVFLGLFISDRFLSPIRRLKNAMAGIIKEPESEKRLKVAGSDELAELASIYNQMIDRMQKNIDSQKQFVEDVSHELRTPVAIVEGHLNLLERWGKDDPEILEESIQASVQEISRMKSLVQEMLDLSRAVQVDIQYKDERTDVKQLVSQLHNNFQLVHEDFTFNLDIDVEGEAIVNMYRNHLEQVLIILLDNAVKYSKDRKEVHLSLATSGDRVQIAVQDFGEGISEEDSQKIFNRFYRVDKARSREKGGNGLGLSIAKQLINGYGGTISVDSVPGRGSVFRIELKLLQNQAKDQDSTDSKGQKKE

SEQ ID NO: 3319 - DNA, 1581 bp, Alloiococcus otitidis; identical to SEQ ID NO: 3317
  CDS (61)..(1578)

SEQ ID NO: 3320 - protein, 506 aa, Alloiococcus otitidis
MNLKGRGLNIERLSIKWKWSLIISATIIFVYLIFAMLVYYSTQQVVLDKESQEIEIAMGNAEEVLKPLQEEVTEENIEDLVKDQQVAVNTFRDRYDQADSRSGDREGAISKLSLRLFDLDGKEVYAIGANDYPFQVTNKFILRPVSDDPNFSLMGVKPLVSETSQERIGYIQIINNLASFHHVISQIISSIFFIGLLVVVLSVFLGLFISDRFLSPIRRLKNAMAGIIKEPESEKRLKVAGSDELAELASIYNQMIDRMQKNIDSQKQFVEDVSHELRTPVAIVEGHLNLLERWGKDDPEILEESIQASVQEISRMKSLVQEMLDLSRAVQVDIQYKDERTDVKQLVSQLHNNFQLVHEDFTFNLDIDVEGEAIVNMYRNHLEQVLIILLDNAVKYSKDRKEVHLSLATSGDRVQIAVQDFGEGISEEDSQKIFNRFYRVDKARSREKGGNGLGLSIAKQLINGYGGTISVDSVPGRGSVFRIELKLLQNQAKDQDSTDSKGQKKE

SEQ ID NO: 3321 - DNA, 987 bp, Alloiococcus otitidis
  CDS (91)..(984)
ataaagggtgaagcaaatttgaaaaagaaatataaaagatggttgtttgctgcgagtcttgtcctaacaaccctcttcttatctggctgtatgcggttggatgagaacaatgagccagtaggatttttctctgaattgatgtacgactacttggtagtccccatggaggctctcttggactggctgggtggcttctttggtaactatggtttggcgattattgccattaccgttatcatccggatcatcctcctgccaattaccttaaaccaacaaagatccatgatgaagtctcagatccagatggcggatatcaagccgattatcgacgagatccaagctgacttaaaggaaaccaaggacccagcccgtaagcaagaattgaacgaagagttgatgcaagtttaccgggacaatgatatcaatgtcttcgggcaaatggcaggctgcctgcccctctttatccaaatgcccatcttcattgctatcttccatgtcttccgctactctgaagccatcgcttcaactgaatttttaggcatccaactagggtctcccagcatcctcctagccctcattacgggtggcctctactttatggagtccaagatgatgcaaaaacgaatgccagaccaagcccctggtggcggtggcatgacccttatgatgcccgttatgatggtctttattgccataacctctccttcaggcttaaccctctacttcttgacctcaggtatcttaggcatcctccaatcctactacttaaacaacttctttaaacccaaacttgaagcccaattgaaggaaaaatatggggacaaaaaagttgttggtcggcgacaaagaccaaaaacccaaacctcaactagccaagctggctcagtcagtggccaagacaagcaagaagacaaactggctaaacaaaaacagcgaaaccgaaaccggaacaagggtaaacaagaccaccaccggtcccagcaatag

SEQ ID NO: 3322 - protein, 298 aa, Alloiococcus otitidis
MRLDENNEPVGFFSELMYDYLVVPMEALLDWLGGFFGNYGLAIIAITVIIRIILLPITLNQQRSMMKSQIQMADIKPIIDEIQADLKETKDPARKQELNEELMQVYRDNDINVFGQMAGCLPLFIQMPIFIAIFHVFRYSEAIASTEFLGIQLGSPSILLALITGGLYFMESKMMQKRMPDQAPGGGGMTLMMPVMMVFIAITSPSGLTLYFLTSGILGILQSYYLNNFFKPKLEAQLKEKYGDKKVVGRRQRPKTQTSTSQAGSVSGQDKQEDKLAKQKQRNRNRNKGKQDHHRSQQ

SEQ ID NO: 3323 - DNA, 987 bp, Alloiococcus otitidis; identical to SEQ ID NO: 3321
  CDS (19)..(984)

SEQ ID NO: 3324 - protein, 322 aa, Alloiococcus otitidis
MKKKYKRWLFAASLVLTTLFLSGCMRLDENNEPVGFFSELMYDYLVVPMEALLDWLGGFFGNYGLAIIAITVIIRIILLPITLNQQRSMMKSQIQMADIKPIIDEIQADLKETKDPARKQELNEELMQVYRDNDINVFGQMAGCLPLFIQMPIFIAIFHVFRYSEAIASTEFLGIQLGSPSILLALITGGLYFMESKMMQKRMPDQAPGGGGMTLMMPVMMVFIAITSPSGLTLYFLTSGILGILQSYYLNNFFKPKLEAQLKEKYGDKKVVGRRQRPKTQTSTSQAGSVSGQDKQEDKLAKQKQRNRNRNKGKQDHHRSQQ

SEQ ID NO: 3325 - DNA, 255 bp, Alloiococcus otitidis
  CDS (19)..(252)
gctcgtgctcaaagctttttgtgtcttaactattgctgggaccggtggtggtcttgtttacccttgttccggtttcggtttcgctgtttttgtttagccagtttgtcttcttgcttgtcttggccactgactgagccagcttggctagttgaggtttgggtttttggtctttgtcgccgaccaacaacttttttgtccccatatttttccttcaattgggcttcaagtttgggtttaaagaagttgtttaagtag

SEQ ID NO: 3326 - protein, 78 aa, Alloiococcus otitidis
MCLNYCWDRWWSCLPLFRFRFRCFCLASLSSCLSWPLTEPAWLVEVWVFGLCRRPTTFLSPYFSFNWASSLGLKKLFK

SEQ ID NO: 3327 - DNA, 390 bp, Alloiococcus otitidis
  CDS (19)..(387)
tgcaaaggagtgtctctcatgtcttctattctagataatttttttgataaaggaaaaaaccgaaagtcaaatggccaagtcagctacctgaatgaccgaccaagcggggatggccaggtcaaaatcaccgcccaaattactggccaggtccagggagtgggcttccgtttttctacccaacaggcagcccaagagttaggcgttggtggccttgtccgtaatgaaagtgacggcaacgtctatgtggaagctaatgctgaccctgaaaccatggatgaatttatcgaacggctccgactcggcccttccccagcagcccaggtggaccgagttgaagtcacctatgcccctgaccttaaggaaagagacaaattcacccaagccaattga

SEQ ID NO: 3328 - protein, 123 aa, Alloiococcus otitidis
MSSILDNFFDKGKNRKSNGQVSYLNDRPSGDGQVKITAQITGQVQGVGFRFSTQQAAQELGVGGLVRNESDGNVYVEANADPETMDEFIERLRLGPSPAAQVDRVEVTYAPDLKERDKFTQAN

SEQ ID NO: 3329 - DNA, 390 bp, Alloiococcus otitidis; identical to SEQ ID NO: 3327
  CDS (10)..(387)

SEQ ID NO: 3330 - protein, 126 aa, Alloiococcus otitidis
MSLMSSILDNFFDKGKNRKSNGQVSYLNDRPSGDGQVKITAQITGQVQGVGFRFSTQQAAQELGVGGLVRNESDGNVYVEANADPETMDEFIERLRLGPSPAAQVDRVEVTYAPDLKERDKFTQAN

SEQ ID NO: 3331 - DNA, 414 bp, Alloiococcus otitidis
  CDS (91)..(411)
atattaccggcgatatcccggccaatcgccacttccaaggggtcagtagagtcctctgagctgccctcaaccacttcacggaaggagaccatgttaacgtggttattaggaacttcaatcccaatcactgccttgcccggtatgggggcttccatccggatatccttggcagccaaggccagggcaatatcattggaaagattgacgattttagacaccttgaccccggtagctggttggatttcatacttggtcactgctgggccaaggttggccttgacaaccttggcatccaccccaaagctttggaaggtgtcttccagcttcttaacattggcttcaattgtattgaattcttggctttggtcttggtctggcactgggtctagcaagcttagaggcggtagtttgtaa

SEQ ID NO: 3332 - protein, 107 aa, Alloiococcus otitidis
MLTWLLGTSIPITALPGMGASIRISLAAKARAISLERLTILDTLTPVAGWISYLVTAGPRLALTTLASTPKLWKVSSSFLTLASIVLNSWLWSWSGTGSSKLRGGSL

SEQ ID NO: 3333 - DNA, 2421 bp, Alloiococcus otitidis
  CDS (304)..(2418)
gagacatgcaagatggcaaaaaaaagacgtcgaagcagtaagcgacgtaaaaaaagacaatttccaacagaagtcataggcatcgtccttgtgttagtcagtgcctttgcagtaggccaatttggttttctaggtactttcctggctaatatcttaagggccttaactggggagtcttatatcatcctggctggggccattatctttattggtctctatgctatttttaaaggaaagttccccaaactgaccaaccgggttaacctgggttttttactggtctacctatctgttttaatctttatgcactggcattatttccgtgatttcgtgggaggcgagaccagcttaaccaacctgacctggcaggccataagccaagaggttttaaccaataccattgaattgaatctgggagggggaatcatcggggccggattttttgaagtcttccaattactcctgggttctccagggaccttcctggttatcttcctatccctctttgttgggattatgaccctgggcgacttttcctacaatatatttttggaatctactcgagatagcttggtccaagccggtaagtggttgaaccaagtcttttctagagccaagagcaagcaagcttcaaaaaaaagcaagtctaaaaaggccaaaaccagcaagcaatctcaagcaaaagaggatcccaaggctaaccgtcaagctagttcagctaaagacctcatggcccaggaagcagcatcagctagccaagaaactagtcaagaaaaatctgcactagaaattgaatccgtctatgggggtcctgcagccagccaccaggacaagcctgatactgaggggcaagaacaggctagcccgcttcaaaaagaaagaagtcaagaagaagacaatgccaactcggacattggtgacttggacatcagtgaggaggaaaatacagattacaaactaccgcctctaagcttgctagacccagtgccagaccaagaccaaagccaagaattcaatacaattgaagccaatgttaagaagctggaagacaccttccaaagctttggggtggatgccaaggttgtcaaggccaaccttggcccagcagtgaccaagtatgaaatccaaccagctaccggggtcaaggtgtctaaaatcgtcaatctttccaatgatattgccctggccttggctgccaaggatatccggatggaagcccccataccgggcaaggcagtgattgggattgaagttcctaataaccacgttaacatggtctccttccgtgaagtggttgagggcagctcagaggactctactgaccccttggaagtggcgattggccgggatatcgccggtaatattcagatcgccaacctggccaagatgccccacctcttgattgcgggggctaccgggtccggtaagtcggttgccattaatggaattattgccagtatccttctcaaggccaaacccaatgaagtgaagttgatgatgattgaccctaaaatggtagaattgaacatttataatggaattccccacctcttgaccccagtggtaaccaaccctaaaaaagcggcccaggccttacacaaggtggtccaagaaatggaaagacggtatgaattatttgctgcctctgggactcggaacatggcaagctacaatgagtttatccaagagaaaaaccaggcaaaagatggggaggcaggcttgcccttgccttatattgtggtcattgtcgatgagttggctgacttgatgatggtagcttctaatgaagtagaaaatgccatcactcgactagctcaaatggcccgggcagcgggaatccacatgattttagccacccaaagacccagtgtggatgtcattacgggagtggtcaaggctaacatcccttcccggatggcctttgctgtttcttccgggactgactcccggaccattttggactccaacggggctgagaaattactgggccggggcgacatgctctaccagcccatgggagccaacaaggccagccgggtccaaggggccttcatttccgatgatgaggtcaaccggatcgtcaaccacgtcaaaaaccagcaggatgccaattacattgaggaaatgattccaactgaccaagactcatctggccaagaagaaccagaggacgaatactaccaagatgcggtggaaatggtggtggaattgcaaacagctagcatttctctcctccaacgccggtttaaaattggctacaaccgggctgcccggattgtcgatgaaatggaagcccggggcgtagtcggtccccatgaagggtctaaaccccgacaagtcctccttgaaagcctagattcagacccagatgacccaagtcctaaccaagtttctgaagacccagctgatccagcagactag

SEQ ID NO: 3334 - protein, 705 aa, Alloiococcus otitidis
MHWHYFRDFVGGETSLTNLTWQAISQEVLTNTIELNLGGGIIGAGFFEVFQLLLGSPGTFLVIFLSLFVGIMTLGDFSYNIFLESTRDSLVQAGKWLNQVFSRAKSKQASKKSKSKKAKTSKQSQAKEDPKANRQASSAKDLMAQEAASASQETSQEKSALEIESVYGGPAASHQDKPDTEGQEQASPLQKERSQEEDNANSDIGDLDISEEENTDYKLPPLSLLDPVPDQDQSQEFNTIEANVKKLEDTFQSFGVDAKVVKANLGPAVTKYEIQPATGVKVSKIVNLSNDIALALAAKDIRMEAPIPGKAVIGIEVPNNHVNMVSFREVVEGSSEDSTDPLEVAIGRDIAGNIQIANLAKMPHLLIAGATGSGKSVAINGIIASILLKAKPNEVKLMMIDPKMVELNIYNGIPHLLTPVVTNPKKAAQALHKVVQEMERRYELFAASGTRNMASYNEFIQEKNQAKDGEAGLPLPYIVVIVDELADLMMVASNEVENAITRLAQMARAAGIHMILATQRPSVDVITGVVKANIPSRMAFAVSSGTDSRTILDSNGAEKLLGRGDMLYQPMGANKASRVQGAFISDDEVNRIVNHVKNQQDANYIEEMIPTDQDSSGQEEPEDEYYQDAVEMVVELQTASISLLQRRFKIGYNRAARIVDEMEARGVVGPHEGSKPRQVLLESLDSDPDDPSPNQVSEDPADPAD

SEQ ID NO: 3335 - DNA, 2421 bp, Alloiococcus otitidis; identical to SEQ ID NO: 3333
  CDS (13)..(2418)

SEQ ID NO: 3336 - protein, 802 aa, Alloiococcus otitidis
MAKKRRRSSKRRKKRQFPTEVIGIVLVLVSAFAVGQFGFLGTFLANILRALTGESYIILAGAIIFIGLYAIFKGKFPKLTNRVNLGFLLVYLSVLIFMHWHYFRDFVGGETSLTNLTWQAISQEVLTNTIELNLGGGIIGAGFFEVFQLLLGSPGTFLVIFLSLFVGIMTLGDFSYNIFLESTRDSLVQAGKWLNQVFSRAKSKQASKKSKSKKAKTSKQSQAKEDPKANRQASSAKDLMAQEAASASQETSQEKSALEIESVYGGPAASHQDKPDTEGQEQASPLQKERSQEEDNANSDIGDLDISEEENTDYKLPPLSLLDPVPDQDQSQEFNTIEANVKKLEDTFQSFGVDAKVVKANLGPAVTKYEIQPATGVKVSKIVNLSNDIALALAAKDIRMEAPIPGKAVIGIEVPNNHVNMVSFREVVEGSSEDSTDPLEVAIGRDIAGNIQIANLAKMPHLLIAGATGSGKSVAINGIIASILLKAKPNEVKLMMIDPKMVELNIYNGIPHLLTPVVTNPKKAAQALHKVVQEMERRYELFAASGTRNMASYNEFIQEKNQAKDGEAGLPLPYIVVIVDELADLMMVASNEVENAITRLAQMARAAGIHMILATQRPSVDVITGVVKANIPSRMAFAVSSGTDSRTILDSNGAEKLLGRGDMLYQPMGANKASRVQGAFISDDEVNRIVNHVKNQQDANYIEEMIPTDQDSSGQEEPEDEYYQDAVEMVVELQTASISLLQRRFKIGYNRAARIVDEMEARGVVGPHEGSKPRQVLLESLDSDPDDPSPNQVSEDPADPAD

SEQ ID NO: 3337 - DNA, 1110 bp, Alloiococcus otitidis
  CDS (10)..(1107)
tggaggtttatgatgtcaagaaaattaaaaagccttttaggcctagctgcttcttcaatgcttttagcagcttgccaaggacaggatgctggtgaaaacccagaccaagaccaagcccaaaaccaagaacaagaccaaggtcaagaaggcggtggtgaccaagcaagtggtgatttttccattgccatggttaccgatgaaggtggggttgacgaccggtcctttaaccaatctgcttgggaagggatgcaagagtggtcagacgaaaccggcaatgaatctacttacttccaatctgatgatacttctgactttgtccctaacttgaaccaggccatccaagggggctacgatatcgtttacggtatcggttttatgctccgggactcaattgaagagatcgcccaacaaaatgaagaccaatactttggtatcgtagacgatgaagttgacttggacaatgtggtttcccttaactttggagaccatgaagcttctttcctagctggtgtggcagcggccttgactactgaaaccggtcaagttggttttatcggcggtattgaaagtccaattattgaccgcttcgaaactggctttttagctggtgttgaacacgtggacgacaccattgaagtggacgttcaatatgctgagtcctttggggatgcagcccaagcccaacaaatcgctaacggcatgtactcttctggggctgatattattttccacgcagctggtgctgcagggaacggcttgtttactgaagctcgtaaccggatggaagacgtgtctgacacacaattatgggttatcggagtagaccgggaccaagaagctgaaggtgaatggtctggtggtaatttaaccttgacttctaccattaaagaagttggcaatgccatcgtttcttcagttgaacaaacccagtccgaaggtttccctggtggtgaaaacatccaatacggtctagccaatgatggtgtagatattgtcgaagggaacatggaagctgatgtttgggaagaagttcaaaatgtccgccaacaaattctagatggtgaaattgaagtgcctgaattctcccaagaatgggattctgaagaatag

SEQ ID NO: 3338 - protein, 366 aa, Alloiococcus otitidis
MMSRKLKSLLGLAASSMLLAACQGQDAGENPDQDQAQNQEQDQGQEGGGDQASGDFSIAMVTDEGGVDDRSFNQSAWEGMQEWSDETGNESTYFQSDDTSDFVPNLNQAIQGGYDIVYGIGFMLRDSIEEIAQQNEDQYFGIVDDEVDLDNVVSLNFGDHEASFLAGVAAALTTETGQVGFIGGIESPIIDRFETGFLAGVEHVDDTIEVDVQYAESFGDAAQAQQIANGMYSSGADIIFHAAGAAGNGLFTEARNRMEDVSDTQLWVIGVDRDQEAEGEWSGGNLTLTSTIKEVGNAIVSSVEQTQSEGFPGGENIQYGLANDGVDIVEGNMEADVWEEVQNVRQQILDGEIEVPEFSQEWDSEE

SEQ ID NO: 3339 - DNA, 381 bp, Alloiococcus otitidis
  CDS (19)..(378)
cgttggcggtcttctggaatgtggccgaggccttgttcggtaatttgtctgggctttttgttcttaatatcaaacttgttgaggttgatttcgcctgattcaatgggttttaaacctgcgatagcctggatcaattcgctttggccattgccgtctataccagcaatccctaaaatttcaccggctcggatatcaaggcttaaacccttgactgcttccagacctctggaatctttgaccactaagtcttcaagagataggacgatttccttacgcttggctggctttttatccacccggaaattaaccgaccgacccaccatcatatcagctagggcttggctggaagtcgatttaacgtcaaccgtatcgatactttga

SEQ ID NO: 3340 - protein, 120 aa, Alloiococcus otitidis
MWPRPCSVICLGFLFLISNLLRLISPDSMGFKPAIAWINSLWPLPSIPAIPKISPARISRLKPLTASRPLESLTTKSSRDRTISLRLAGFLSTRKLTDRPTIISARAWLEVDLTSTVSIL

SEQ ID NO: 3341 - DNA, 330 bp, Alloiococcus otitidis
  CDS (79)..(327)
actgttgcaataatattgccatcatacataacggcgatccggtctgaaacatttaagacctcatccagttcaaaactcatgagcaagactgccttacctgagtctctctgttccaccaaacgtttgtggatatattcgatggctccaacatccaagccccgggttggttgggctgcaatcaagagttcgggattacggtccatttcccttgcaataatggctttttgctggttaccacctgacaaggcttgggctttttccttaggtccttgtgagcgaacgtcaaactcatcaatcaaacgctcagcatgttccttgatgctgtcatga

SEQ ID NO: 3342 - protein, 83 aa, Alloiococcus otitidis
MSKTALPESLCSTKRLWIYSMAPTSKPRVGWAAIKSSGLRSISLAIMAFCWLPPDKAWAFSLGPCERTSNSSIKRSACSLMLS

SEQ ID NO: 3343 - DNA, 1596 bp, Alloiococcus otitidis
  CDS (268)..(1593)
ggagggattcttttggctcaaaatgagaatgtcattgaaatggtcgatatcaccaaaaaatttggtgactttaaggccaatgacaaggtaaatttgcaagtcaaaaaaggggaagtacacgccttgctcggagagaatggggcaggcaagtctaccctaatgaatatattatctggcctactggaacccactagtggggagattcgggttaaaggggaaaaggtatccatctcttcacccgaaaaagcccgccaatacggaatcggcatggtctaccaacactttatgctagtcgataagtttactattaccgaaaatatcatgttgggtcgggaagagcacaagtttggctacatagaccaaaaggctgcccgtaaacggatcgaagacctgtccaaccgctacggcctgaaggtcgaccccaaggctgtcgtccgggatgtttcagtcggcatgcagcagcgggtggaaattatcaaggccctttacggtgggtcagatatcttaattttagatgagccaaccgccgttttaaccccccaagaaatagaagaattgatggagattatgcggaacatgaccgctgaaggcaagtccatcatcctcatcacccacaaattagatgaaattaagcaggtggctgaccggtgtacggttattcgccggggtcaaagtatcgatacggttgacgttaaatcgacttccagccaagccctagctgatatgatggtgggtcggtcggttaatttccgggtggataaaaagccagccaagcgtaaggaaatcgtcctatctcttgaagacttagtggtcaaagattccagaggtctggaagcagtcaagggtttaagccttgatatccgagccggtgaaattttagggattgctggtatagacggcaatggccaaagcgaattgatccaggctatcgcaggtttaaaacccattgaatcaggcgaaatcaacctcaacaagtttgatattaagaacaaaaagcccagacaaattaccgaacaaggcctcggccacattccagaagaccgccaacgctacggcttaatcctggacatgaccctggaggaaaatttagtcctacaaagctattatcaacttcctttctccagtggcggtatcctcgatcatgacagcatcaaggaacatgctgagcgtttgattgatgagtttgacgttcgctcacaaggacctaaggaaaaagcccaagccttgtcaggtggtaaccagcaaaaagccattattgcaagggaaatggaccgtaatcccgaactcttgattgcagcccaaccaacccggggcttggatgttggagccatcgaatatatccacaaacgtttggtggaacagagagactcaggtaaggcagtcttgctcatgagttttgaactggatgaggtcttaaatgtttcagaccggatcgccgttatgtatgatggcaatattattgcaacagttcaagcggaccagaccaatgaaagtgaactgggcttgttaatggcaggggttcccctcgaccaagcccgtgaccaagtcaaggaagaagaaggacgggaggcagaaaatgttcaaagcagaaaatag

SEQ ID NO: 3344 - protein, 442 aa, Alloiococcus otitidis
MVYQHFMLVDKFTITENIMLGREEHKFGYIDQKAARKRIEDLSNRYGLKVDPKAVVRDVSVGMQQRVEIIKALYGGSDILILDEPTAVLTPQEIEELMEIMRNMTAEGKSIILITHKLDEIKQVADRCTVIRRGQSIDTVDVKSTSSQALADMMVGRSVNFRVDKKPAKRKEIVLSLEDLVVKDSRGLEAVKGLSLDIRAGEILGIAGIDGNGQSELIQAIAGLKPIESGEINLNKFDIKNKKPRQITEQGLGHIPEDRQRYGLILDMTLEENLVLQSYYQLPFSSGGILDHDSIKEHAERLIDEFDVRSQGPKEKAQALSGGNQQKAIIAREMDRNPELLIAAQPTRGLDVGAIEYIHKRLVEQRDSGKAVLLMSFELDEVLNVSDRIAVMYDGNIIATVQADQTNESELGLLMAGVPLDQARDQVKEEEGREAENVQSRK

SEQ ID NO: 3345 - DNA, 1596 bp, Alloiococcus otitidis; identical to SEQ ID NO: 3343
  CDS (40)..(1593)

SEQ ID NO: 3346 - protein, 518 aa, Alloiococcus otitidis
MVDITKKFGDFKANDKVNLQVKKGEVHALLGENGAGKSTLMNILSGLLEPTSGEIRVKGEKVSISSPEKARQYGIGMVYQHFMLVDKFTITENIMLGREEHKFGYIDQKAARKRIEDLSNRYGLKVDPKAVVRDVSVGMQQRVEIIKALYGGSDILILDEPTAVLTPQEIEELMEIMRNMTAEGKSIILITHKLDEIKQVADRCTVIRRGQSIDTVDVKSTSSQALADMMVGRSVNFRVDKKPAKRKEIVLSLEDLVVKDSRGLEAVKGLSLDIRAGEILGIAGIDGNGQSELIQAIAGLKPIESGEINLNKFDIKNKKPRQITEQGLGHIPEDRQRYGLILDMTLEENLVLQSYYQLPFSSGGILDHDSIKEHAERLIDEFDVRSQGPKEKAQALSGGNQQKAIIAREMDRNPELLIAAQPTRGLDVGAIEYIHKRLVEQRDSGKAVLLMSFELDEVLNVSDRIAVMYDGNIIATVQADQTNESELGLLMAGVPLDQARDQVKEEEGREAENVQSRK

SEQ ID NO: 3347 - DNA, 1596 bp, Alloiococcus otitidis; identical to SEQ ID NO: 3343
  CDS (13)..(1593)

SEQ ID NO: 3348 - protein, 527 aa, Alloiococcus otitidis
MAQNENVIEMVDITKKFGDFKANDKVNLQVKKGEVHALLGENGAGKSTLMNILSGLLEPTSGEIRVKGEKVSISSPEKARQYGIGMVYQHFMLVDKFTITENIMLGREEHKFGYIDQKAARKRIEDLSNRYGLKVDPKAVVRDVSVGMQQRVEIIKALYGGSDILILDEPTAVLTPQEIEELMEIMRNMTAEGKSIILITHKLDEIKQVADRCTVIRRGQSIDTVDVKSTSSQALADMMVGRSVNFRVDKKPAKRKEIVLSLEDLVVKDSRGLEAVKGLSLDIRAGEILGIAGIDGNGQSELIQAIAGLKPIESGEINLNKFDIKNKKPRQITEQGLGHIPEDRQRYGLILDMTLEENLVLQSYYQLPFSSGGILDHDSIKEHAERLIDEFDVRSQGPKEKAQALSGGNQQKAIIAREMDRNPELLIAAQPTRGLDVGAIEYIHKRLVEQRDSGKAVLLMSFELDEVLNVSDRIAVMYDGNIIATVQADQTNESELGLLMAGVPLDQARDQVKEEEGREAENVQSRK

SEQ ID NO: 3349 - DNA, 351 bp, Alloiococcus otitidis
  CDS (49)..(348)
ggcaaggcagattggacgaaaatattacggaaggttcccaggccgtggatggccccgcccagaccagccaaggccccactgaggaccatggctaggataatatttttcttggtactcattccagcgtattcagctgcatcactgttcaagccaactgcccgaagttcaaaaccagcagtcgtctgtttcatcaagaaccaaaagaggactacacaaagaatggctaggaagaagcctaagttaagtcgagacccagctgtcaaattagttaggaaacccagagccaagctggcattctcaccaacaatttcggtccggttccccgtagctagcacattccggatcatgtaa

SEQ ID NO: 3350 - protein, 100 aa, Alloiococcus otitidis
MAPPRPAKAPLRTMARIIFFLVLIPAYSAASLFKPTARSSKPAVVCFIKNQKRTTQRMARKKPKLSRDPAVKLVRKPRAKLAFSPTISVRFPVASTFRIM

SEQ ID NO: 3351 - DNA, 1131 bp, Alloiococcus otitidis
  CDS (604)..(1128)
tggcaggggttcccctcgaccaagcccgtgaccaagtcaaggaagaagaaggacgggaggcagaaaatgttcaaagcagaaaataggaacttacttcatgcgattataatccccctcattgccatcgtttttggttttattcttggggccttaatcatgcttttctttggctacagccctcttgatgcctacaatgccatgctatccaatgtcttaaccaatccgtatttcttcggtgaagctttaagacaggcaaccgtcctcaccctaactggacttggctttaacatggcctaccaggcaggattctttaatattggcttgtctgggcagttgctgatgggttggttgtttgccatctggtttgccttgcttttcccggacatgccgaaaatactagctgtccctgtcttcctcttggtcggtttagtgatcggtgctttatgggctgggatcgcaggcttccttcgagcttattttggtaccaatgaagtcattgtgaccattatgctgaactatacagccctccacttttccaattacatgatccggaatgtgctagctacggggaaccggaccgaaattgttggtgagaatgccagcttggctctgggtttcctaactaatttgacagctgggtctcgacttaacttaggcttcttcctagccattctttgtgtagtcctcttttggttcttgatgaaacagacgactgctggttttgaacttcgggcagttggcttgaacagtgatgcagctgaatacgctggaatgagtaccaagaaaaatattatcctagccatggtcctcagtggggccttggctggtctgggcggggccatccacggcctgggaaccttccgtaatattttcgtccaatctgccttgcctcaagaaggctttgacgggattgcggttggtctacttggcttaggcaacccatttgggaccttcttgtcagccattttacttgggatcttgaatattggggccggttttatgccaaatggtgccggtgtgccggatgagctagccgatgtaattgtagccggcatcatcttctttattggtgctaattacatcatccgacgcttatttacccggtcaagcaaaaaaggaggtcaaatctaa

SEQ ID NO: 3352 - protein, 175 aa, Alloiococcus otitidis
MALGFLTNLTAGSRLNLGFFLAILCVVLFWFLMKQTTAGFELRAVGLNSDAAEYAGMSTKKNIILAMVLSGALAGLGGAIHGLGTFRNIFVQSALPQEGFDGIAVGLLGLGNPFGTFLSAILLGILNIGAGFMPNGAGVPDELADVIVAGIIFFIGANYIIRRLFTRSSKKGGQI

SEQ ID NO: 3353 - DNA, 1131 bp, Alloiococcus otitidis; identical to SEQ ID NO: 3351
  CDS (67)..(1128)

SEQ ID NO: 3354 - protein, 354 aa, Alloiococcus otitidis
MFKAENRNLLHAIIIPLIAIVFGFILGALIMLFFGYSPLDAYNAMLSNVLTNPYFFGEALRQATVLTLTGLGFNMAYQAGFFNIGLSGQLLMGWLFAIWFALLFPDMPKILAVPVFLLVGLVIGALWAGIAGFLRAYFGTNEVIVTIMLNYTALHFSNYMIRNVLATGNRTEIVGENASLALGFLTNLTAGSRLNLGFFLAILCVVLFWFLMKQTTAGFELRAVGLNSDAAEYAGMSTKKNIILAMVLSGALAGLGGAIHGLGTFRNIFVQSALPQEGFDGIAVGLLGLGNPFGTFLSAILLGILNIGAGFMPNGAGVPDELADVIVAGIIFFIGANYIIRRLFTRSSKKGGQI

SEQ ID NO: 3355 - DNA, 1131 bp, Alloiococcus otitidis; identical to SEQ ID NO: 3351
  CDS (28)..(1128)

SEQ ID NO: 3356 - protein, 367 aa, Alloiococcus otitidis
MTKSRKKKDGRQKMFKAENRNLLHAIIIPLIAIVFGFILGALIMLFFGYSPLDAYNAMLSNVLTNPYFFGEALRQATVLTLTGLGFNMAYQAGFFNIGLSGQLLMGWLFAIWFALLFPDMPKILAVPVFLLVGLVIGALWAGIAGFLRAYFGTNEVIVTIMLNYTALHFSNYMIRNVLATGNRTEIVGENASLALGFLTNLTAGSRLNLGFFLAILCVVLFWFLMKQTTAGFELRAVGLNSDAAEYAGMSTKKNIILAMVLSGALAGLGGAIHGLGTFRNIFVQSALPQEGFDGIAVGLLGLGNPFGTFLSAILLGILNIGAGFMPNGAGVPDELADVIVAGIIFFIGANYIIRRLFTRSSKKGGQI

SEQ ID NO: 3357 - DNA, 1011 bp, Alloiococcus otitidis
  CDS (634)..(1008)
ttacatcatccgacgcttatttacccggtcaagcaaaaaaggaggtcaaatctaatggatgtcctatcgcttttacaattaatcgtgtcttccagtctcatttatgcagcacctttgatttttgctgccttgggcggagcattttctgaacgttcagggattgtcaacattggtttggaaggtattatggtcattggggcctttgcttctgccgttttcaacctggaatttgccagtcaattaggtccttggaccccctggatcggacttttagtcggcgggctagctggtctaattttctccttgctccatgctttggctaccgtccacttccgggctgaccacattatctcaggtaccgcccttaacatggcagcaccgggtcttgcagtctttttggtccgggctatttatggagccgctcaaacaggtccactgcctcgccctttaccttcccaaacttttccattaatcagtcaaattccagttatcggggacattttctttaccgggacatcaggaccagcctacctgggtgttttggtagccgtcttagcctggtttatcatctttaaaactcggtttggcctccgcttgcggtcagttggagaacaccctcgtgcagctgaaaccatggggattaatgtttacttaatgaaatattgtggtgtcatgctgtctggcttactggctggggtagggggagccatcctgtcccaagccatccacaatgaatttggtttcttaaccgttaccggtcaaggctttatggccctagcagccatgatcttcggcaagtggaaccctcttggggctatgggggcagccatcttctttggtttcgcccaaagtttggctaatactggtaattacatccctatcatccaagatgttccgacagtttggttgaacattgctccatacctcttaaccattatcgttcttgtcgtcttcattggtaagtctgaagctcctaaatacctaggcgacactttcgtgaagagcaaatag

SEQ ID NO: 3358 - protein, 125 aa, Alloiococcus otitidis
MGINVYLMKYCGVMLSGLLAGVGGAILSQAIHNEFGFLTVTGQGFMALAAMIFGKWNPLGAMGAAIFFGFAQSLANTGNYIPIIQDVPTVWLNIAPYLLTIIVLVVFIGKSEAPKYLGDTFVKSK

SEQ ID NO: 3359 - DNA, 1011 bp, Alloiococcus otitidis; identical to SEQ ID NO: 3357
  CDS (55)..(1008)

SEQ ID NO: 3360 - protein, 318 aa, Alloiococcus otitidis
MDVLSLLQLIVSSSLIYAAPLIFAALGGAFSERSGIVNIGLEGIMVIGAFASAVFNLEFASQLGPWTPWIGLLVGGLAGLIFSLLHALATVHFRADHIISGTALNMAAPGLAVFLVRAIYGAAQTGPLPRPLPSQTFPLISQIPVIGDIFFTGTSGPAYLGVLVAVLAWFIIFKTRFGLRLRSVGEHPRAAETMGINVYLMKYCGVMLSGLLAGVGGAILSQAIHNEFGFLTVTGQGFMALAAMIFGKWNPLGAMGAAIFFGFAQSLANTGNYIPIIQDVPTVWLNIAPYLLTIIVLVVFIGKSEAPKYLGDTFVKSK

SEQ ID NO: 3361 - DNA, 1008 bp, Alloiococcus otitidis
  CDS (46)..(1005)
aaagaaggtgagattttggaaacgagaactgtagataataaacagatgatggacaggaagttaaactttattcggcagcctagccgagaactgcaggcagaagtggtaaaaactttgcgaacgaaggctttcgccagcgatgtccaacgactgatcaagggttttgctggcgaaaggcaatttgatgagatttattcgactttcgcccaggactcctgggactatcttacagattttcattttgaattgggaactttgccccagctggatgccattttaatcactcccggccatatccatgtttacgaggttaaaaattatccggcttattgtcaggtccaaaatgatattttttcctacaatggccagccgcttgccagcaatcctttcaaccaggtgagggccattaaatcccggtttaacagcctgctgtctttgatcggctaccaaggccaggcaacttaccatctggtcatgatcaataaggactgctattttaaagaccgggaccaatttagtgatgtcttgatgcgcaacgaacttaagcttcatttccaaagcctacaaggcgcctcttataaaaagaacccgtcaaacttgttggaaaaaataaagcggtttgaaaccgacaatccttaccacaaaaattatgcttttgattatcgggacttgcccccggggatcctgtgctacaagtgcggatctttggacacttatccgtcttacaaacaaatcaagtgccgagactgcgggcatgcaaggagcaaaacccaggccttgcagaacttaatcggcgaactctctatcttggaccagaacacccctatccgaacccatgatatccaccagtatagtggtgggctgttgagtaaaaggtttattatggatagaatttcgcatttactaaacaaaaaattgcctaaagctcgtcactatgtaccatcaacaaaaatgtataatttttctgccctttataagattatccatgataaatttaatatctattga

SEQ ID NO: 3362 - protein, 320 aa, Alloiococcus otitidis
MMDRKLNFIRQPSRELQAEVVKTLRTKAFASDVQRLIKGFAGERQFDEIYSTFAQDSWDYLTDFHFELGTLPQLDAILITPGHIHVYEVKNYPAYCQVQNDIFSYNGQPLASNPFNQVRAIKSRFNSLLSLIGYQGQATYHLVMINKDCYFKDRDQFSDVLMRNELKLHFQSLQGASYKKNPSNLLEKIKRFETDNPYHKNYAFDYRDLPPGILCYKCGSLDTYPSYKQIKCRDCGHARSKTQALQNLIGELSILDQNTPIRTHDIHQYSGGLLSKRFIMDRISHLLNKKLPKARHYVPSTKMYNFSALYKIIHDKFNIY

SEQ ID NO: 3363 - DNA, 1008 bp, Alloiococcus otitidis; identical to SEQ ID NO: 3361
  CDS (16)..(1005)

SEQ ID NO: 3364 - protein, 330 aa, Alloiococcus otitidis
METRTVDNKQMMDRKLNFIRQPSRELQAEVVKTLRTKAFASDVQRLIKGFAGERQFDEIYSTFAQDSWDYLTDFHFELGTLPQLDAILITPGHIHVYEVKNYPAYCQVQNDIFSYNGQPLASNPFNQVRAIKSRFNSLLSLIGYQGQATYHLVMINKDCYFKDRDQFSDVLMRNELKLHFQSLQGASYKKNPSNLLEKIKRFETDNPYHKNYAFDYRDLPPGILCYKCGSLDTYPSYKQIKCRDCGHARSKTQALQNLIGELSILDQNTPIRTHDIHQYSGGLLSKRFIMDRISHLLNKKLPKARHYVPSTKMYNFSALYKIIHDKFNIY

SEQ ID NO: 3365 - DNA, 678 bp, Alloiococcus otitidis
  CDS (115)..(675)
gaagtagtattatacaattgttataaatgtaaaggaaatgaaatatacaacgcttgctttttgaccgatctcttcgttataaataggaataaagatatttttaggaggcaaataatgttaaaaaatgccctagcttttagccaccaacttttacaagaccaagtcgaaaaaggtgacttggtcatcgatgccacccttgggaatggcaaggatgccttatttttatctaacttagtgggaaaagaagggaaacttattggctttgatatccaagttcaagcactggcaaaaactcaagaacgactagaagctgaatcttgtccagcaaaaaccactttgtttttagctgggcatgaaaacatggcttcttattgccacaacgattctgctaaagctatcgtttttaacctgggttacctgccgggtagcgacaaaaccctaactacccaagcccaaacgaccatcaaggctgttgaagcaggcctagacatcctccagccaggtggattaatgaccctgatggtctatgccggtcattcagagggtcaagtcgaaaaagaagaattagaagtctacctccaaggcttagaccaaagtaattacactgtctttaagtaccaacccctaaaccagaagaatacgccaccctaccttctggccattgagaagttggcataa

SEQ ID NO: 3366 - protein, 187 aa, Alloiococcus otitidis
MLKNALAFSHQLLQDQVEKGDLVIDATLGNGKDALFLSNLVGKEGKLIGFDIQVQALAKTQERLEAESCPAKTTLFLAGHENMASYCHNDSAKAIVFNLGYLPGSDKTLTTQAQTTIKAVEAGLDILQPGGLMTLMVYAGHSEGQVEKEELEVYLQGLDQSNYTVFKYQPLNQKNTPPYLLAIEKLA

SEQ ID NO: 3367 - DNA, 678 bp, Alloiococcus otitidis; identical to SEQ ID NO: 3365
  CDS (61)..(675)

SEQ ID NO: 3368 - protein, 205 aa, Alloiococcus otitidis
MTDLFVINRNKDIFRRQIMLKNALAFSHQLLQDQVEKGDLVIDATLGNGKDALFLSNLVGKEGKLIGFDIQVQALAKTQERLEAESCPAKTTLFLAGHENMASYCHNDSAKAIVFNLGYLPGSDKTLTTQAQTTIKAVEAGLDILQPGGLMTLMVYAGHSEGQVEKEELEVYLQGLDQSNYTVFKYQPLNQKNTPPYLLAIEKLA

SEQ ID NO: 3369 - DNA, 540 bp, Alloiococcus otitidis
  CDS (49)..(537)
tgcttgtttgccttggctaggagccgcaacccggaggacttggcctgggtggatgaggtcactggccaagttgttccagtttttcaactggccaacggtaacattgtggttttggccaatccggtaaaggctgtcacctggtttgacggtgtaggtggtttgggagcttgtttgagaaccgttttggctaggctgacttggtttgcttgtttgacttggcttgttagcttgggctggcttacttggtttagccggtgtacttggggcttgtttgccttggcttggtcctgcaacccggaggacttggcctgggtggatgaggtcactggtcaagttgttccagtttttcaactggccaacggtaacattgtagttttggccaatccggtagaggctgtcacctggttgaactacataagtgccagcggaagtttggcttgggtttgccgagtaatatctttggcctttttgcttgtcgttgtcaactggaacagtatttgtgttgttagctggaactgggccattgtcaaaccgggttaa

SEQ ID NO: 3370 - protein, 163 aa, Alloiococcus otitidis
MDEVTGQVVPVFQLANGNIVVLANPVKAVTWFDGVGGLGACLRTVLARLTWFACLTWLVSLGWLTWFSRCTWGLFALAWSCNPEDLAWVDEVTGQVVPVFQLANGNIVVLANPVEAVTWLNYISASGSLAWVCRVISLAFLLVVVNWNSICVVSWNWAIVKPG

SEQ ID NO: 3371 - DNA, 540 bp, Alloiococcus otitidis; identical to SEQ ID NO: 3369
  CDS (4)..(537)

SEQ ID NO: 3372 - protein, 178 aa, Alloiococcus otitidis
MFALARSRNPEDLAWVDEVTGQVVPVFQLANGNIVVLANPVKAVTWFDGVGGLGACLRTVLARLTWFACLTWLVSLGWLTWFSRCTWGLFALAWSCNPEDLAWVDEVTGQVVPVFQLANGNIVVLANPVEAVTWLNYISASGSLAWVCRVISLAFLLVVVNWNSICVVSWNWAIVKPG

SEQ ID NO: 3373 - DNA, 1365 bp, Alloiococcus otitidis
  CDS (91)..(1362)
acggtgaaactatcgcatatacataattttaaatttaagacggctttaaccttggggattgcagcgggaagcctggccctggggggagcaatgaaccaagtttctgcccaagaagaccctggtcaagaggttagtactttacttggtatatacaagtcttcaaatgaccctcaagtccaggaaaatttgaagacccaaattatcaaccagatcttaaacaatggtggggcgaatttaattggccacctcaacattgctgagatgactccggcggaattggaaaatgtagcaaatgcctttatccaatccgtgaatgcaaataaccaagctagtcaagaacaagcggaagacgaaagttcaccagagccggaagaaccggttgaaagagatgaaaaagctgacttagaagaagctgaagcagaagaaactgatgattctgtggaaaacgaagaagacaaggcggaagaccaagagcttgccaatcctgaccaagaaaaaccggacgaaactgaagtggcacaagaccaagaaaaaactgaagtcactgaagaagaactagttgagcctgaaaacttagaagaccaaggtcaggatccaaaccaacaagtccaggctaaagaagaaccgggtttgagacaggttgacccgaatgcccctgccctcaaaagctcccaagcccaagaccatgtcgttcaaccaggtgaaaccctctacagtatcgctcgggactacaataccagtgctgaaaaattagctgccattaacaatattaataatccaaataacttacgggtaggccaaaccttgacccttcaccaagcgaatgtggacagtgctgggggacggagagactttgagatccaaactttcgccgctacaccagctccacaagagactattaaaactggtaatgaattcattgataatatttcggccgaagcttcccaagtagcggacgagtacaacttgtatgcttcagtgatgattgcccaagctgctttagaaactggttacggtaaaagtagtttgtcccaaccgccacaccacaacttattcgggatgaagggtagttacaatggtcaaacggctaatttctcaacccaagaagacacccaaaatgggatggttaccatccgcgacaactttagaagctaccctaactacactgcttcccttagagactatgctgataagttacggaacggtctttcatgggaccctaactactattctggtacttggaaagaaaataccaatacttaccgggatgcaactcgttggttaactggtcgttatgcaactgaccgtaactacgataaaaaactaaatagaattattgaacaatggggacttaacccggtttga

SEQ ID NO: 3374 - protein, 424 aa, Alloiococcus otitidis
MNQVSAQEDPGQEVSTLLGIYKSSNDPQVQENLKTQIINQILNNGGANLIGHLNIAEMTPAELENVANAFIQSVNANNQASQEQAEDESSPEPEEPVERDEKADLEEAEAEETDDSVENEEDKAEDQELANPDQEKPDETEVAQDQEKTEVTEEELVEPENLEDQGQDPNQQVQAKEEPGLRQVDPNAPALKSSQAQDHVVQPGETLYSIARDYNTSAEKLAAINNINNPNNLRVGQTLTLHQANVDSAGGRRDFEIQTFAATPAPQETIKTGNEFIDNISAEASQVADEYNLYASVMIAQAALETGYGKSSLSQPPHHNLFGMKGSYNGQTANFSTQEDTQNGMVTIRDNFRSYPNYTASLRDYADKLRNGLSWDPNYYSGTWKENTNTYRDATRWLTGRYATDRNYDKKLNRIIEQWGLNPV

SEQ ID NO: 3375 - DNA, 1365 bp, Alloiococcus otitidis; identical to SEQ ID NO: 3373
  CDS (52)..(1362)

SEQ ID NO: 3376 - protein, 437 aa, Alloiococcus otitidis
MGIAAGSLALGGAMNQVSAQEDPGQEVSTLLGIYKSSNDPQVQENLKTQIINQILNNGGANLIGHLNIAEMTPAELENVANAFIQSVNANNQASQEQAEDESSPEPEEPVERDEKADLEEAEAEETDDSVENEEDKAEDQELANPDQEKPDETEVAQDQEKTEVTEEELVEPENLEDQGQDPNQQVQAKEEPGLRQVDPNAPALKSSQAQDHVVQPGETLYSIARDYNTSAEKLAAINNINNPNNLRVGQTLTLHQANVDSAGGRRDFEIQTFAATPAPQETIKTGNEFIDNISAEASQVADEYNLYASVMIAQAALETGYGKSSLSQPPHHNLFGMKGSYNGQTANFSTQEDTQNGMVTIRDNFRSYPNYTASLRDYADKLRNGLSWDPNYYSGTWKENTNTYRDATRWLTGRYATDRNYDKKLNRIIEQWGLNPV

SEQ ID NO: 3377 - DNA, 1365 bp, Alloiococcus otitidis; identical to SEQ ID NO: 3373
  CDS (4)..(1362)

SEQ ID NO: 3378 - protein, 453 aa, Alloiococcus otitidis
MKLSHIHNFKFKTALTLGIAAGSLALGGAMNQVSAQEDPGQEVSTLLGIYKSSNDPQVQENLKTQIINQILNNGGANLIGHLNIAEMTPAELENVANAFIQSVNANNQASQEQAEDESSPEPEEPVERDEKADLEEAEAEETDDSVENEEDKAEDQELANPDQEKPDETEVAQDQEKTEVTEEELVEPENLEDQGQDPNQQVQAKEEPGLRQVDPNAPALKSSQAQDHVVQPGETLYSIARDYNTSAEKLAAINNINNPNNLRVGQTLTLHQANVDSAGGRRDFEIQTFAATPAPQETIKTGNEFIDNISAEASQVADEYNLYASVMIAQAALETGYGKSSLSQPPHHNLFGMKGSYNGQTANFSTQEDTQNGMVTIRDNFRSYPNYTASLRDYADKLRNGLSWDPNYYSGTWKENTNTYRDATRWLTGRYATDRNYDKKLNRIIEQWGLNPV

SEQ ID NO: 3379 - DNA, 1677 bp, Alloiococcus otitidis
  CDS (10)..(1674)
atagaattattgaacaatggggacttaacccggtttgacaatggcccagttccagctaacaacacaaatactgttccagttgacaacgacaagcaaaaaggccaaagatattactcggcaaacccaagccaaacttccgctggcacttatgtagttcaaccaggtgacagcctctaccggattggccaaaactacaatgttaccgttggccagttgaaaaactggaacaacttgaccagtgacctcatccacccaggccaagtcctccgggttgcaggaccaagccaaggcaaacaagccccaagtacaccggctaaaccaagtaagccagcccaagctaacaagccaagtcaaacaagcaaaccaagtcagcctagccaaaacggttctcaaacaagctcccaaaccacctacaccgtcaaaccaggtgacagcctttaccggattggccaaaaccacaatgttaccgttggccagttgaaaaactggaacaacttggccagtgacctcatccacccaggccaagtcctccgggttgcggctcctagccaaggcaaacaagcatcaagcacaccggctaaaccaagtaagccagcccaagctaagaaaccaagccaaacaagcaaaccaactcagcctagccaaggtggttctcaaacaagctcccaagtcacctacaccgtcaaaccaggtgacagcctttaccggattggccaaaaccacaatgttaccgttggccagttgaaaaactggaacaacttgaccagtgacctcatccacccaggccaagtcctccgggttgcggctccaagccaaggcaaacaagcatcaagcacaccggctaaaccaagtaagccagcccaagctaacaaaccaagccaaacaagcaaaccaactcagcctagccaaggtggttctcaaacaagctcccaagccacctacaccgtcaaaccaggcgacagcctctaccggattgcccttaaccacaacaccactgttccccgtttgcgggctatcaacggcatcaaaggtgacttgatccacccaggtcaggttatccgcctaagtgaaggccaagcaactgcttctagctccaaacaacagtcggctcaaccagcttccaaccaaccagctagtcagacttacacggttaaaccaggcgacaccctttacaagattggccaagaacacaacttaagtgtggctcagttaaaagacttgaaccaacttactggtgacttgatccacccaggccaagtcttgcgtgtctcccagtctggtcgcaaaccagcccaaacagtgaaagcaagcaaaaagactaaccagtcaactagccgaccatctggcctagctgtcacttataccgttagaccaggggacaccttgagtgccattgcccgacgctacaacttaagtgtcaaccaactagtggcttggaacaagctagaaaaccctaaccacttgagtgtgggtcagactttagtcttaaacttacgaacagatgctaaaacgagtgtgaaacctcaaaaagctaaccggtcaacctatactgttaaggcaggggacaccctctaccatattgcccgtcaacatggtactagtgtagctaacttaaaagcattaaacggcttaactagcgacttgatcttggtcggtcaagaactgcgggtcaagtaa

SEQ ID NO: 3380 - protein, 555 aa, Alloiococcus otitidis
MNNGDLTRFDNGPVPANNTNTVPVDNDKQKGQRYYSANPSQTSAGTYVVQPGDSLYRIGQNYNVTVGQLKNWNNLTSDLIHPGQVLRVAGPSQGKQAPSTPAKPSKPAQANKPSQTSKPSQPSQNGSQTSSQTTYTVKPGDSLYRIGQNHNVTVGQLKNWNNLASDLIHPGQVLRVAAPSQGKQASSTPAKPSKPAQAKKPSQTSKPTQPSQGGSQTSSQVTYTVKPGDSLYRIGQNHNVTVGQLKNWNNLTSDLIHPGQVLRVAAPSQGKQASSTPAKPSKPAQANKPSQTSKPTQPSQGGSQTSSQATYTVKPGDSLYRIALNHNTTVPRLRAINGIKGDLIHPGQVIRLSEGQATASSSKQQSAQPASNQPASQTYTVKPGDTLYKIGQEHNLSVAQLKDLNQLTGDLIHPGQVLRVSQSGRKPAQTVKASKKTNQSTSRPSGLAVTYTVRPGDTLSAIARRYNLSVNQLVAWNKLENPNHLSVGQTLVLNLRTDAKTSVKPQKANRSTYTVKAGDTLYHIARQHGTSVANLKALNGLTSDLILVGQELRVK

SEQ ID NO: 3381 - DNA, 2148 bp, Alloiococcus otitidis
  CDS (55)..(2145)
acgccctatggattgactccaatccatggggcgttttttcttaaagaaaggaagatggccatgtcattcaaccacaaaacaattgagcacaaatggcaggatttttgggaaaaggataaaacctttaaaaccctagaagatagtgacaaggaaacttattatgctctggatatgttcccttacccctctggtcaaggcctccacgttggccacccagaaggttataccgcaactgacattatttcccggatgaaacgggcccaaggctataatgtcctccaccccatgggctgggatgcatttggcttgccggccgagcagtacgctattgatacaggtaatgatccagctgactttacccaagccaatatccaagtttttaaaaaacagattaagtctttaggctttagttatgattgggaccgggaaattaacaccacggacccagactactacaagtggacccagtggattttcaaaaaattatacgaacatgacctggcctatgaagaggaagtggccgtcaactggtgtccggccttggggacagttttagccaacgaagaagtcattgacggcaagagtgaaagagggggccacccagtttaccgtaaacctatgaaacagtggatgctgcggattacggcttatgccgaccgcctcttagaagatttgaaagacctggactggccagaaagtattaaagaaatgcaaagaaattggatcggcaagtctgagggggctgaagtcagcttccaagtcaaagacagtgaccattcttttaccgtctttaccacccggccagataccctctacggggcaaccttttgtgttttagctccagagtccaagttggtgaaagatattgtgacagcggaccaaaaagaagcagttgaccaatatgtggaccaggctgccagaaagtctgacttggagcggactgacttgaacaaggaaaaaagcggggtctttactggggcttatgccatcaaccctgttaatggaaaggcaatcccaatttgggtagctgattatgtcttgatttcatacgggactggggctgtcatgtcggtaccggcccatgatgagcgggattatgaatttgccaaaaaacatgatctcgatattatccaagtcctagaaggtggggacattgaccaagaagcctatacaggtgacggccctcacattaattcagatatcttaaatggtttaaaccaggaggaggccattgacaaggtaattgaagtcttagaagacaagaggactggacaaagacaagtcaactaccgcttgcgggactggctctttgcccgccaacgcttctggggcgaaccgatcccggtcattcactgggaagatgggaccaagagcctggttgatgatgccgacctgccgcttgagctacctgaagcagacgatattaaaccatctgggacaggggagtcacctctggccaatatcagtgactgggttaatgtggtagaccccgaaacaggtaaaaaaggtaaaagggacaccaacaccatgccacagtgggctgggtcctcttggtacttcctccgctacgttgacccccacaatgaccaagccatagctgacccagacaagttggccaagtggcttccggttgacttatatattggcggggccgaacacgctgtcttgcacctcctttatgctcgtttctggcacaagtttctctatgacttgggtattgtcccaagcaaagaacccttccaaaaactttacaaccaaggcatgatcctaggggaagggaatgaaaaaatgtccaagtctaaaggcaatgtggtcaaccccgatgatgtggtggaagcttatggggctgacaccctccgtctttatgaaatgtttatgggacccttggacgcttcagttgcctggtcagaagatggattagaaggagcgcgtaagttcttagaccggtcatggcgactcttaatagatgaggaagatcagctgcgggatcgagtgaccacctataatgatggccagctggacgtggtttacaatcagactgttaaaaaagtgaccgaagactttgaagatctccactttaacactggtatttcccagttgatggtttttgtcaatgaagccaacaaggcagaagccttgcccagttga

SEQ ID NO: 3382 - protein, 697 aa, Alloiococcus otitidis
MAMSFNHKTIEHKWQDFWEKDKTFKTLEDSDKETYYALDMFPYPSGQGLHVGHPEGYTATDIISRMKRAQGYNVLHPMGWDAFGLPAEQYAIDTGNDPADFTQANIQVFKKQIKSLGFSYDWDREINTTDPDYYKWTQWIFKKLYEHDLAYEEEVAVNWCPALGTVLANEEVIDGKSERGGHPVYRKPMKQWMLRITAYADRLLEDLKDLDWPESIKEMQRNWIGKSEGAEVSFQVKDSDHSFTVFTTRPDTLYGATFCVLAPESKLVKDIVTADQKEAVDQYVDQAARKSDLERTDLNKEKSGVFTGAYAINPVNGKAIPIWVADYVLISYGTGAVMSVPAHDERDYEFAKKHDLDIIQVLEGGDIDQEAYTGDGPHINSDILNGLNQEEAIDKVIEVLEDKRTGQRQVNYRLRDWLFARQRFWGEPIPVIHWEDGTKSLVDDADLPLELPEADDIKPSGTGESPLANISDWVNVVDPETGKKGKRDTNTMPQWAGSSWYFLRYVDPHNDQAIADPDKLAKWLPVDLYIGGAEHAVLHLLYARFWHKFLYDLGIVPSKEPFQKLYNQGMILGEGNEKMSKSKGNVVNPDDVVEAYGADTLRLYEMFMGPLDASVAWSEDGLEGARKFLDRSWRLLIDEEDQLRDRVTTYNDGQLDVVYNQTVKKVTEDFEDLHFNTGISQLMVFVNEANKAEALPS

SEQ ID NO: 3383 - DNA, 2148 bp, Alloiococcus otitidis; identical to SEQ ID NO: 3381
  CDS (13)..(2145)

SEQ ID NO: 3384 - protein, 711 aa, Alloiococcus otitidis
MTPIHGAFFLKERKMAMSFNHKTIEHKWQDFWEKDKTFKTLEDSDKETYYALDMFPYPSGQGLHVGHPEGYTATDIISRMKRAQGYNVLHPMGWDAFGLPAEQYAIDTGNDPADFTQANIQVFKKQIKSLGFSYDWDREINTTDPDYYKWTQWIFKKLYEHDLAYEEEVAVNWCPALGTVLANEEVIDGKSERGGHPVYRKPMKQWMLRITAYADRLLEDLKDLDWPESIKEMQRNWIGKSEGAEVSFQVKDSDHSFTVFTTRPDTLYGATFCVLAPESKLVKDIVTADQKEAVDQYVDQAARKSDLERTDLNKEKSGVFTGAYAINPVNGKAIPIWVADYVLISYGTGAVMSVPAHDERDYEFAKKHDLDIIQVLEGGDIDQEAYTGDGPHINSDILNGLNQEEAIDKVIEVLEDKRTGQRQVNYRLRDWLFARQRFWGEPIPVIHWEDGTKSLVDDADLPLELPEADDIKPSGTGESPLANISDWVNVVDPETGKKGKRDTNTMPQWAGSSWYFLRYVDPHNDQAIADPDKLAKWLPVDLYIGGAEHAVLHLLYARFWHKFLYDLGIVPSKEPFQKLYNQGMILGEGNEKMSKSKGNVVNPDDVVEAYGADTLRLYEMFMGPLDASVAWSEDGLEGARKFLDRSWRLLIDEEDQLRDRVTTYNDGQLDVVYNQTVKKVTEDFEDLHFNTGISQLMVFVNEANKAEALPS

SEQ ID NO: 3385 - DNA, 378 bp, Alloiococcus otitidis
  CDS (52)..(375)
tggtttttgtcaatgaagccaacaaggcagaagccttgcccagttgattacatgaaaggctttgtcaaactactagctcctgtcgcaccccacttaggcgaagaactttggcactacttaaccaacagtgacgaatccatcacttatgagccttggccaaattatgatccagaaaaattagtttctgaccaagtggaagtggttttccaagtgaatggcaaggtccgggccaaagaccaaacatctaagtccatttcaaaagaggagcttcaagaacttgcactcgcaaaccccaatgtccaaaaacaattagaaggcaaggaagtagcgaaagttattgtagtacctggtaagttggtaaatatcgtggcaaactaa

SEQ ID NO: 3386 - protein, 108 aa, Alloiococcus otitidis
MKGFVKLLAPVAPHLGEELWHYLTNSDESITYEPWPNYDPEKLVSDQVEVVFQVNGKVRAKDQTSKSISKEELQELALANPNVQKQLEGKEVAKVIVVPGKLVNIVAN

SEQ ID NO: 3387 - DNA, 378 bp, Alloiococcus otitidis; identical to SEQ ID NO: 3385
  CDS (13)..(375)

SEQ ID NO: 3388 - protein, 121 aa, Alloiococcus otitidis
MKPTRQKPCPVDYMKGFVKLLAPVAPHLGEELWHYLTNSDESITYEPWPNYDPEKLVSDQVEVVFQVNGKVRAKDQTSKSISKEELQELALANPNVQKQLEGKEVAKVIVVPGKLVNIVAN

SEQ ID NO: 3389 - DNA, 1674 bp, Alloiococcus otitidis
  CDS (1381)..(1671)
gtgaaaatgatgaccgaaaataaaatagaaagaaaagaagaccgcgagccatcgcttgacaaccaaatcctaactgggtcggcctggatgacggttgggagcatggggtcaaggatcctaggagccctctacattatcctctggttctcctggatgggagggggtgagacagcagcggctgccaacggtctctaccaaatggcctacaacccctacaactttttcctgatgttggctacagccggtattccttctgctatctctaaatcggtctcccgctacaacgggatgcaggaatatgaaacagccaaggccatctacaagcagggactgaagattatgcttttgactggagtcttgtccgctgcttttatgtatttcttcgcaccttggtttgcccggactggtccttcagctgatgtatcggacgggatcgtggtcatgcgggccctaacaccagccctcttgattatccctgccatgtcggtcacccggggtttaatccagggtcatagccggatgaaagaaccagctatttcccaaattgtagaacagttggtccggatcgtctttattctggctgctgtctaccttatccgccaggtctttaatggcgagccagttacggcggttgccatgtcgaccttcggggcctttatcggggctgtggcttcttttgcctacctttatttccggatgaagaccatcccaaccgtctttgaccggagccctgaagagagtttgaaccaggttcacgtttcccctaaacaattgatttgggagattattaaaacctccatcccatttattattgtgtcaactggtgttattatcttccagatcatcgaccagcagacctatgccccattgatgcgggtcttttcgagcttgtctgatgcagacattcagattacttatgggattacccaggctaatgcccacaaattatccatgatcttgacttcctttgggtcagccttggccattacgtctgttcccctcatttccaacttaacggcccaacacaatatcaaagaagttagacggcaattggtcaaggggatcttgcttttaatgttcattattttacccgcttctttggggatgttagtggtggctgaaccgctttactctttcttctatgactatagtgacctaggctaccgggtgacacaagtttatgctattgtcaccattatcctagctctctacattatgcttggtaacatttgccaatcagctaacttgcaacgaccagctatctttgcggtggggctcggttttgtcatcaaaattgttacccaaccgctctttatttggatggccggaccttatggcatgctcatttcaacctttatcggcctaggtctgacttccgccttgatgatgagagccctctacaatgaaactcgctattcccttaagttcttgtttagacgctttctcctgctcttattgatgtcagttctgatggctgttgttgttttagtctttagagaaatcttaagacccttcctagactaccacaatagtttccaaggactgatcgctaccggtattttggccctagttggctttctagtttacatgtatatggccttaaaattgcgggtagccgaccgcctcttaggtgacaaagtggccattgttcgcgaaaaactcaacattaaataa

SEQ ID NO: 3390 - protein, 97 aa, Alloiococcus otitidis
MMMRALYNETRYSLKFLFRRFLLLLLMSVLMAVVVLVFREILRPFLDYHNSFQGLIATGILALVGFLVYMYMALKLRVADRLLGDKVAIVREKLNIK

SEQ ID NO: 3391 - DNA, 1674 bp, Alloiococcus otitidis; identical to SEQ ID NO: 3389
  CDS (1051)..(1671)

SEQ ID NO: 3392 - protein, 207 aa, Alloiococcus otitidis
MVKGILLLMFIILPASLGMLVVAEPLYSFFYDYSDLGYRVTQVYAIVTIILALYIMLGNICQSANLQRPAIFAVGLGFVIKIVTQPLFIWMAGPYGMLISTFIGLGLTSALMMRALYNETRYSLKFLFRRFLLLLLMSVLMAVVVLVFREILRPFLDYHNSFQGLIATGILALVGFLVYMYMALKLRVADRLLGDKVAIVREKLNIK

SEQ ID NO: 3393 - DNA, 1674 bp, Alloiococcus otitidis; identical to SEQ ID NO: 3389
  CDS (229)..(1671)

SEQ ID NO: 3394 - protein, 481 aa, Alloiococcus otitidis
MLATAGIPSAISKSVSRYNGMQEYETAKAIYKQGLKIMLLTGVLSAAFMYFFAPWFARTGPSADVSDGIVVMRALTPALLIIPAMSVTRGLIQGHSRMKEPAISQIVEQLVRIVFILAAVYLIRQVFNGEPVTAVAMSTFGAFIGAVASFAYLYFRMKTIPTVFDRSPEESLNQVHVSPKQLIWEIIKTSIPFIIVSTGVIIFQIIDQQTYAPLMRVFSSLSDADIQITYGITQANAHKLSMILTSFGSALAITSVPLISNLTAQHNIKEVRRQLVKGILLLMFIILPASLGMLVVAEPLYSFFYDYSDLGYRVTQVYAIVTIILALYIMLGNICQSANLQRPAIFAVGLGFVIKIVTQPLFIWMAGPYGMLISTFIGLGLTSALMMRALYNETRYSLKFLFRRFLLLLLMSVLMAVVVLVFREILRPFLDYHNSFQGLIATGILALVGFLVYMYMALKLRVADRLLGDKVAIVREKLNIK

SEQ ID NO: 3395 - DNA, 1674 bp, Alloiococcus otitidis; identical to SEQ ID NO: 3389
  CDS (88)..(1671)

SEQ ID NO: 3396 - protein, 528 aa, Alloiococcus otitidis
MTVGSMGSRILGALYIILWFSWMGGGETAAAANGLYQMAYNPYNFFLMLATAGIPSAISKSVSRYNGMQEYETAKAIYKQGLKIMLLTGVLSAAFMYFFAPWFARTGPSADVSDGIVVMRALTPALLIIPAMSVTRGLIQGHSRMKEPAISQIVEQLVRIVFILAAVYLIRQVFNGEPVTAVAMSTFGAFIGAVASFAYLYFRMKTIPTVFDRSPEESLNQVHVSPKQLIWEIIKTSIPFIIVSTGVIIFQIIDQQTYAPLMRVFSSLSDADIQITYGITQANAHKLSMILTSFGSALAITSVPLISNLTAQHNIKEVRRQLVKGILLLMFIILPASLGMLVVAEPLYSFFYDYSDLGYRVTQVYAIVTIILALYIMLGNICQSANLQRPAIFAVGLGFVIKIVTQPLFIWMAGPYGMLISTFIGLGLTSALMMRALYNETRYSLKFLFRRFLLLLLMSVLMAVVVLVFREILRPFLDYHNSFQGLIATGILALVGFLVYMYMALKLRVADRLLGDKVAIVREKLNIK

SEQ ID NO: 3397 - DNA, 1674 bp, Alloiococcus otitidis; identical to SEQ ID NO: 3389
  CDS (7)..(1671)

SEQ ID NO: 3398 - protein, 555 aa, Alloiococcus otitidis
MMTENKIERKEDREPSLDNQILTGSAWMTVGSMGSRILGALYIILWFSWMGGGETAAAANGLYQMAYNPYNFFLMLATAGIPSAISKSVSRYNGMQEYETAKAIYKQGLKIMLLTGVLSAAFMYFFAPWFARTGPSADVSDGIVVMRALTPALLIIPAMSVTRGLIQGHSRMKEPAISQIVEQLVRIVFILAAVYLIRQVFNGEPVTAVAMSTFGAFIGAVASFAYLYFRMKTIPTVFDRSPEESLNQVHVSPKQLIWEIIKTSIPFIIVSTGVIIFQIIDQQTYAPLMRVFSSLSDADIQITYGITQANAHKLSMILTSFGSALAITSVPLISNLTAQHNIKEVRRQLVKGILLLMFIILPASLGMLVVAEPLYSFFYDYSDLGYRVTQVYAIVTIILALYIMLGNICQSANLQRPAIFAVGLGFVIKIVTQPLFIWMAGPYGMLISTFIGLGLTSALMMRALYNETRYSLKFLFRRFLLLLLMSVLMAVVVLVFREILRPFLDYHNSFQGLIATGILALVGFLVYMYMALKLRVADRLLGDKVAIVREKLNIK

SEQ ID NO: 3399 - DNA, 1674 bp, Alloiococcus otitidis; identical to SEQ ID NO: 3389
  CDS (1)..(1671)

SEQ ID NO: 3400 - protein, 557 aa, Alloiococcus otitidis
MKMMTENKIERKEDREPSLDNQILTGSAWMTVGSMGSRILGALYIILWFSWMGGGETAAAANGLYQMAYNPYNFFLMLATAGIPSAISKSVSRYNGMQEYETAKAIYKQGLKIMLLTGVLSAAFMYFFAPWFARTGPSADVSDGIVVMRALTPALLIIPAMSVTRGLIQGHSRMKEPAISQIVEQLVRIVFILAAVYLIRQVFNGEPVTAVAMSTFGAFIGAVASFAYLYFRMKTIPTVFDRSPEESLNQVHVSPKQLIWEIIKTSIPFIIVSTGVIIFQIIDQQTYAPLMRVFSSLSDADIQITYGITQANAHKLSMILTSFGSALAITSVPLISNLTAQHNIKEVRRQLVKGILLLMFIILPASLGMLVVAEPLYSFFYDYSDLGYRVTQVYAIVTIILALYIMLGNICQSANLQRPAIFAVGLGFVIKIVTQPLFIWMAGPYGMLISTFIGLGLTSALMMRALYNETRYSLKFLFRRFLLLLLMSVLMAVVVLVFREILRPFLDYHNSFQGLIATGILALVGFLVYMYMALKLRVADRLLGDKVAIVREKLNIK

SEQ ID NO: 3401 - DNA, 747 bp, Alloiococcus otitidis
  CDS (28)..(744)
tatactagttgtgaaaggcgtgatttcatgcgactcgataaacttttagcccattctggctttggcacccgcaagcaagtcaagcaattgatcaaggaccaattagttgaagtcaatggccaagtgaccaaaaaacacggcgacaaggtggaccctgactcggacaccatcactgtctctggtgtcccagtccactaccaggaatttatctaccttatgttaaataaaccccagggagttatctcagcaacccaggatgacttccatgaaacggtggtggacttactggagcctaatgacatcttgcaagacccccacccagttggccgtttggatattgacactgagggtcttttgatcctgaccaatgacggcaagctaacccacctcttgacttctcccaaccgtgatgtagaaaaggtctatggcgctgtggtagaaggcttgattggcgaggaagaagtggcaaaatttgctagcggtttgaccctagatgacggctaccaaaccaaaccagcccagttagagattcttgaccaagacccagaaaacaacctaacccaggttcaagtcaccttaactgaaggcaagtttcaccaggttaagcggatgttccaggcagtagatagccaggtcatctccctcaagcgtctagctatgggatctctaactctagaccctggcctagaagcgggcagctaccgggaattgactcaagcagaagtggatcagttaaaggcagaataa

SEQ ID NO: 3402 - protein, 239 aa, Alloiococcus otitidis
MRLDKLLAHSGFGTRKQVKQLIKDQLVEVNGQVTKKHGDKVDPDSDTITVSGVPVHYQEFIYLMLNKPQGVISATQDDFHETVVDLLEPNDILQDPHPVGRLDIDTEGLLILTNDGKLTHLLTSPNRDVEKVYGAVVEGLIGEEEVAKFASGLTLDDGYQTKPAQLEILDQDPENNLTQVQVTLTEGKFHQVKRMFQAVDSQVISLKRLAMGSLTLDPGLEAGSYRELTQAEVDQLKAE

SEQ ID NO: 3403 - DNA, 294 bp, Alloiococcus otitidis
  CDS (22)..(291)
actaggtcgcctccggaatgcgtgacgagaaggaatgatattttgaaaccactatatacaaatggcctcctagccttggtggccattcccctctcctacctcttatttgaatacctgatccaaatttacttcctaggcctaattattatctttttccttattttcttccagacccctcgcccttctaagactgttgacgaaagagagctaaaccggtccaagcgcatcctggtgctactgaccaccttgaccttctcttacggcctaggcggtattttgggtttgatcttgtaa

SEQ ID NO: 3404 - protein, 90 aa, Alloiococcus otitidis
MTRRNDILKPLYTNGLLALVAIPLSYLLFEYLIQIYFLGLIIIFFLIFFQTPRPSKTVDERELNRSKRILVLLTTLTFSYGLGGILGLIL

SEQ ID NO: 3405 - DNA, 939 bp, Alloiococcus otitidis
  CDS (190)..(936)
ttaaatatattgataggagttgttaagatgactaacaataatgcccaaagtaatcctcagcaagaagaccaagccaacccttttatccccatcagcaaagaaatggtggcttcaaatattcccgtacggccaaacgattcctacaagggagattacggccgggtcttatgcattggcggcagagctgaaatggctggggcgatcagcctggctgcttcagctgccctttattctggagccggcctggtaacagttgctactgatccaaaaaacttccaaacggtacaccagacagccttagaagttatgtgcctggactggactgataaagaccaggtccgccaaaaactccaggctagtgacactattttaatcggtcctggattgggccgaaaccaacacgcccaggacttattagacctggtcctcagccacaccaacgaccagcaaaacttggttattgatgcagacggcctttatctgcttagccagtacgatgtctcccaaattaaactaccagaaaaaaccatccttaccccccaccctggcgagtggaaaaacttaactggtttagacctagcttcgtcaagctggcaggaaagcagtgattggcagaaaaaaattggggccctcctggtcttaaaacaaagccgaacccaggtttataccaacgaccaagtctaccaaaacacagctggtaatccagccatggctgtcggtggcatgggggacaccctagcaggcattataaccggccttctaggccagtatccagattttgaaacagcctgcctgactggagtttttatccacagctacattgccgaccaattggcaacccggtcatacctggtcttgccctccagcattatccccgaaatccccgcctgcatgaaggcctttgtccaggtcaaacaaggccaggaccaagttgagtaa

SEQ ID NO: 3406 - protein, 249 aa, Alloiococcus otitidis
MAGAISLAASAALYSGAGLVTVATDPKNFQTVHQTALEVMCLDWTDKDQVRQKLQASDTILIGPGLGRNQHAQDLLDLVLSHTNDQQNLVIDADGLYLLSQYDVSQIKLPEKTILTPHPGEWKNLTGLDLASSSWQESSDWQKKIGALLVLKQSRTQVYTNDQVYQNTAGNPAMAVGGMGDTLAGIITGLLGQYPDFETACLTGVFIHSYIADQLATRSYLVLPSSIIPEIPACMKAFVQVKQGQDQVE

SEQ ID NO: 3407 - DNA, 939 bp, Alloiococcus otitidis; identical to SEQ ID NO: 3405
  CDS (28)..(936)

SEQ ID NO: 3408 - protein, 303 aa, Alloiococcus otitidis
MTNNNAQSNPQQEDQANPFIPISKEMVASNIPVRPNDSYKGDYGRVLCIGGRAEMAGAISLAASAALYSGAGLVTVATDPKNFQTVHQTALEVMCLDWTDKDQVRQKLQASDTILIGPGLGRNQHAQDLLDLVLSHTNDQQNLVIDADGLYLLSQYDVSQIKLPEKTILTPHPGEWKNLTGLDLASSSWQESSDWQKKIGALLVLKQSRTQVYTNDQVYQNTAGNPAMAVGGMGDTLAGIITGLLGQYPDFETACLTGVFIHSYIADQLATRSYLVLPSSIIPEIPACMKAFVQVKQGQDQVE

SEQ ID NO: 3409 - DNA, 939 bp, Alloiococcus otitidis; identical to SEQ ID NO: 3405
  CDS (10)..(936)

SEQ ID NO: 3410 - protein, 309 aa, Alloiococcus otitidis
MIGVVKMTNNNAQSNPQQEDQANPFIPISKEMVASNIPVRPNDSYKGDYGRVLCIGGRAEMAGAISLAASAALYSGAGLVTVATDPKNFQTVHQTALEVMCLDWTDKDQVRQKLQASDTILIGPGLGRNQHAQDLLDLVLSHTNDQQNLVIDADGLYLLSQYDVSQIKLPEKTILTPHPGEWKNLTGLDLASSSWQESSDWQKKIGALLVLKQSRTQVYTNDQVYQNTAGNPAMAVGGMGDTLAGIITGLLGQYPDFETACLTGVFIHSYIADQLATRSYLVLPSSIIPEIPACMKAFVQVKQGQDQVE

SEQ ID NO: 3411 - DNA, 1485 bp, Alloiococcus otitidis
  CDS (82)..(1482)
ttatatcgaaaaaacatgttaagatatagctatggatacttctgtaatagaataaaccaaaagattgcgaggaatgttaagatgtcaaaccaagaaattaattggaaagaagaagttaagaagtaccaggacgacttcttagctgatttaaaagaagtcctaaaaattgactcagtccgtaacgacgatgaagcgacagatgaattcccggttggtccaggaccagctaaagccctccacaaggccttggaaattgctgaccgggacggctttaccactaaacaagttgaaaactgggctggccacattgaatacggctcaggcgatgaaaccctaggtattttaggccacatggatgtggtccctgttgggtcaggttgggacactgatccttttgaccccgttatcaaagatgggaagctttatgcacgcggggcaagtgacgacaagggacctactttagcagcctactatgccctcaaactcattaaagacttgggactgccagttaacaaacgcatccgattgatcttaggaacagatgaggaaagcgagtggcaaggtgtccaccgctatttagaagtagaagataccccagactttggcttctcaccggatgggaacttcccaatcatcaacggtgaaaaaggtcagtatgaatttgatattgaaacagatgccgacaataccggcgacatcagcttgatttcctttgaagctggcctgcgtaaaaacatggttccacaggatgcgactgccaaagtagaagcagaggatccagagccaatccgagaccaatttgacgactttttcaaagacaaacccgttaaggccaatgctgaaattgatgacaagaccctctcttttgcggtagaaggtaaggcagcccacgggtctaaaccagatgcaggggttaatgcggctacctacctggcttctttcttaaatactcaagccctagacggtggggctaagcaatttgtcaatgtgattgacacttacttgcatgaagacccatacggtgaaaaattagatattgcccaagacaatgaagtgatgggtcggttaacttctaaccctggaattttccgctttgaagaaggggacaagggtctcattaccttggacattcgttacgcgaccggtgatgatgaaagcttaaccaacttgatcaccgaagccttacttggtgaagaggtcactttgaaggtaaaagaaggtcgggtaccacactatgttccaggagatgaccccttggtgaaaaccctcctagatgtttatggtcgtcaaactggcttagaagcccacgaaaaagttatcgggggcggaacttacggccgactatttgaacgtggagttgcctttggtgccctcttcccagactccactgacaccatgcaccaggcaaatgaatttattactgtagacgacttgatggcagccatggcaatttatgcagaagctatctatgaattagtcaaataa

SEQ ID NO: 3412 - protein, 467 aa, Alloiococcus otitidis
MSNQEINWKEEVKKYQDDFLADLKEVLKIDSVRNDDEATDEFPVGPGPAKALHKALEIADRDGFTTKQVENWAGHIEYGSGDETLGILGHMDVVPVGSGWDTDPFDPVIKDGKLYARGASDDKGPTLAAYYALKLIKDLGLPVNKRIRLILGTDEESEWQGVHRYLEVEDTPDFGFSPDGNFPIINGEKGQYEFDIETDADNTGDISLISFEAGLRKNMVPQDATAKVEAEDPEPIRDQFDDFFKDKPVKANAEIDDKTLSFAVEGKAAHGSKPDAGVNAATYLASFLNTQALDGGAKQFVNVIDTYLHEDPYGEKLDIAQDNEVMGRLTSNPGIFRFEEGDKGLITLDIRYATGDDESLTNLITEALLGEEVTLKVKEGRVPHYVPGDDPLVKTLLDVYGRQTGLEAHEKVIGGGTYGRLFERGVAFGALFPDSTDTMHQANEFITVDDLMAAMAIYAEAIYELVK

SEQ ID NO: 3413 - DNA, 1485 bp, Alloiococcus otitidis; identical to SEQ ID NO: 3411
  CDS (16)..(1482)

SEQ ID NO: 3414 - protein, 489 aa, Alloiococcus otitidis
MLRYSYGYFCNRINQKIARNVKMSNQEINWKEEVKKYQDDFLADLKEVLKIDSVRNDDEATDEFPVGPGPAKALHKALEIADRDGFTTKQVENWAGHIEYGSGDETLGILGHMDVVPVGSGWDTDPFDPVIKDGKLYARGASDDKGPTLAAYYALKLIKDLGLPVNKRIRLILGTDEESEWQGVHRYLEVEDTPDFGFSPDGNFPIINGEKGQYEFDIETDADNTGDISLISFEAGLRKNMVPQDATAKVEAEDPEPIRDQFDDFFKDKPVKANAEIDDKTLSFAVEGKAAHGSKPDAGVNAATYLASFLNTQALDGGAKQFVNVIDTYLHEDPYGEKLDIAQDNEVMGRLTSNPGIFRFEEGDKGLITLDIRYATGDDESLTNLITEALLGEEVTLKVKEGRVPHYVPGDDPLVKTLLDVYGRQTGLEAHEKVIGGGTYGRLFERGVAFGALFPDSTDTMHQANEFITVDDLMAAMAIYAEAIYELVK

SEQ ID NO: 3415 - DNA, 924 bp, Alloiococcus otitidis
  CDS (82)..(921)
gtacaggaaccaggccagacacatttcatttcgacttggcaatcgtgctatactagaagaaaagatgaaggaggttgtcctatggatttacacttaaaagataaagtagcccttgttttagcctctagtagtggattgggcaaggcggtggcccaggccctggtccaggaaggggccaaggtggtcatagccagccggtctgaaagtaagctggcccaagcagcaagtgacttgtcaggtcagggggaaggccaggtcaagtacaaggtatttgaccaaagagactatcaaagtatcaaagacctggtcgactttacccgggagacatttggtccaattaatatcctggtagccaattcaggcggccccaaggcagggaattttgaaagcttttcggatgaggaagtccaagaagccttccaattaaccctcaattcctatatccgggttatccgcctcgtcttgcctgacttaaaagaaagccagggccggatcttgctgaattcttcctcttcgattaagcagcctatttcaggactcagcttgtccaatattttcagggctgggatcctaggcctagctaagacccttgcccaagaattggctccccatggtgtcttggtcaacttgattggccctggtcggatcgaaacagaccggatcaaagaactcaaccaaatcaatgctgaccaggctggccaggccttagacgactatgttgccaaagaccaggctgatattcccttaggtcggtacggcaagcctgaagaattcgcccagactgctgcctttttggtctcaggagccaatacctatatcacaggccaaagctcctggtcgatggtggcttggtcaaagccttgtaaaggagccaaagctggagagaaaagtgacttaccgattagcttttacaaagccttgtaa

SEQ ID NO: 3416 - protein, 280 aa, Alloiococcus otitidis
MDLHLKDKVALVLASSSGLGKAVAQALVQEGAKVVIASRSESKLAQAASDLSGQGEGQVKYKVFDQRDYQSIKDLVDFTRETFGPINILVANSGGPKAGNFESFSDEEVQEAFQLTLNSYIRVIRLVLPDLKESQGRILLNSSSSIKQPISGLSLSNIFRAGILGLAKTLAQELAPHGVLVNLIGPGRIETDRIKELNQINADQAGQALDDYVAKDQADIPLGRYGKPEEFAQTAAFLVSGANTYITGQSSWSMVAWSKPCKGAKAGEKSDLPISFYKAL

SEQ ID NO: 3417 - DNA, 519 bp, Alloiococcus otitidis
  CDS (196)..(516)
tctttacaagacccagttaaggaggacaaaaatgaccaaaaaaatatactttgctgcccccttgtttaccgagatggaaacccgctacaaccgatatgtggtcgaccttattcgagacaagtacggggaccaggtcgaaatttacctgctcaggaaaatgagaccattaacgataagacccagtttgcagattctttggcgattgcccaaggggacaatgctgagttagaagaagcagacatcttgattgccatcttagatggagtgactccggattccggcttatcggcagagattggctatttctactcctttaaccggccaatcctagccatttattccgattctcgccagggaacccacggcaaccaggccaaaattgaagccctggacgagattgccgagtctcagttttcttatatcaacttgtacaccgtgggcttggtcaaactaagagggcaaatctaccctagtgcccaagacttggttgataacttggccagctttttgggtaaataa

SEQ ID NO: 3418 - protein, 107 aa, Alloiococcus otitidis
MAIAQGDNAELEEADILIAILDGVTPDSGLSAEIGYFYSFNRPILAIYSDSRQGTHGNQAKIEALDEIAESQFSYINLYTVGLVKLRGQIYPSAQDLVDNLASFLGK

SEQ ID NO: 3419 - DNA, 270 bp, Alloiococcus otitidis
  CDS (34)..(267)
tcatcgaagaaaactaagaggcctaaaagccaggtgatcaattgggtagataccggacccttagcgtattgggccagggactctgccactgcctgggccccacccgttttagaaatgagggcaatcaagcccccaatggccattacttgcaggacaatccctgcattccaggggtcagccagggcatctagcatctcttggaccacggcagtaaaagaggtgaccaaggccatcaagacattaactccagaggccagttggataatatag

SEQ ID NO: 3420 - protein, 78 aa, Alloiococcus otitidis
MINWVDTGPLAYWARDSATAWAPPVLEMRAIKPPMAITCRTIPAFQGSARASSISWTTAVKEVTKAIKTLTPEASWII

SEQ ID NO: 3421 - DNA, 1743 bp, Alloiococcus otitidis
  CDS (1213)..(1740)
gcttttttatttgaaaagaaagggaagaatagaatgaaaaacaaagcacttggtcgaagaatcctggtctccttgaccttgatggcgaccaccatcttagccaacccccttgtggttcaagcccaggatgctgcagaagctaacgctgaacgactaggaatggcgaccttactgcctccaatcctggctattatcttggcctttaccaccaaggatgtcatcttgtccctcttcattggggtctttagtggggcctatattatccaactggcctctggagttaatgtcttgatggccttggtcacctcttttactgccgtggtccaagagatgctagatgccctggctgacccctggaatgcagggattgtcctgcaagtaatggccattgggggcttgattgccctcatttctaaaacgggtggggcccaggcagtggcagagtccctggcccaatacgctaagggtccggtatctacccaattgatcacctggcttttaggcctcttagttttcttcgatgactatgccaacgccttgattgtcggtcccatcatgcggcccgtttctgataatattggaaactcaagagaaagactggcctttgtcattgatgcgacggcagcgccggttaccggtatggccctgatctctacctggatcggttacgagctcagtttaatcagtgaagcctttaatatgattggccaggaagtcaatacttacggctttttcttagaaaccttgccttatcgtttctacaatatctttatgctagcctttgtagtgattacctccattactttaagagaatttgggcctatgaaagatgcccaactccgggctagagaccaaggtcagttggtcgaagaagactcccatgttgaaactaatgatcaagtggttgaggaagggcgaaaagggtctatttggaatgccgtcctccccattgttatgctgattattttctcctttgtcggcttctacttcgacggtcgccaagccctattagcagaagggggtagtgagatagtttccatcttagaaaacaatcccctctcatttgtagccatccgggaaacctttggcgcttcggatgcttccctggtccttttccaatccgcactggctgccagcatcattgccttaattatgggggtctggcaaaaatacttctccctaagcgatggaattgaatcttggtttgacggaatgaaaagtctcatgtctacagctggtgttttgatactagcttggtccctttcatccgtgatggggagtttgggaacggcagaatttctcggtctcccaattagggacagtcatttcacctatcttgctcccatccatcatttttgccttgggttcaattatcacctttgctaccggtacttcctttgggactatggggatcctgatgccccttgccatcccactagcctacaacctagatccggggaacagccaactcttgttgaccacctcagcagccgttttggcaggggctattttaggggaccactcctcaccaatctcggacactaccattatgtcctccatgggggctgggtccaatttgatccaccacgtcagaacccaattgccttatgttctgacagtcgggcttatttcgattgtctttggttacatcccttcagccatgggggttccggtttgggtcttgattccggttgcaattgtcgtcctggttgttttggtttacttcataggggagcccattaa

SEQ ID NO: 3422 - protein, 176 aa, Alloiococcus otitidis
MKSLMSTAGVLILAWSLSSVMGSLGTAEFLGLPIRDSHFTYLAPIHHFCLGFNYHLCYRYFLWDYGDPDAPCHPTSLQPRSGEQPTLVDHLSSRFGRGYFRGPLLTNLGHYHYVLHGGWVQFDPPRQNPIALCSDSRAYFDCLWLHPFSHGGSGLGLDSGCNCRPGCFGLLHRGAH

SEQ ID NO: 3423 - DNA, 1743 bp, Alloiococcus otitidis; identical to SEQ ID NO: 3421
  CDS (82)..(1740)

SEQ ID NO: 3424 - protein, 553 aa, Alloiococcus otitidis
MATTILANPLVVQAQDAAEANAERLGMATLLPPILAIILAFTTKDVILSLFIGVFSGAYIIQLASGVNVLMALVTSFTAVVQEMLDALADPWNAGIVLQVMAIGGLIALISKTGGAQAVAESLAQYAKGPVSTQLITWLLGLLVFFDDYANALIVGPIMRPVSDNIGNSRERLAFVIDATAAPVTGMALISTWIGYELSLISEAFNMIGQEVNTYGFFLETLPYRFYNIFMLAFVVITSITLREFGPMKDAQLRARDQGQLVEEDSHVETNDQVVEEGRKGSIWNAVLPIVMLIIFSFVGFYFDGRQALLAEGGSEIVSILENNPLSFVAIRETFGASDASLVLFQSALAASIIALIMGVWQKYFSLSDGIESWFDGMKSLMSTAGVLILAWSLSSVMGSLGTAEFLGLPIRDSHFTYLAPIHHFCLGFNYHLCYRYFLWDYGDPDAPCHPTSLQPRSGEQPTLVDHLSSRFGRGYFRGPLLTNLGHYHYVLHGGWVQFDPPRQNPIALCSDSRAYFDCLWLHPFSHGGSGLGLDSGCNCRPGCFGLLHRGAH

SEQ ID NO: 3425 - DNA, 1743 bp, Alloiococcus otitidis; identical to SEQ ID NO: 3421
  CDS (34)..(1740)

SEQ ID NO: 3426 - protein, 569 aa, Alloiococcus otitidis
MKNKALGRRILVSLTLMATTILANPLVVQAQDAAEANAERLGMATLLPPILAIILAFTTKDVILSLFIGVFSGAYIIQLASGVNVLMALVTSFTAVVQEMLDALADPWNAGIVLQVMAIGGLIALISKTGGAQAVAESLAQYAKGPVSTQLITWLLGLLVFFDDYANALIVGPIMRPVSDNIGNSRERLAFVIDATAAPVTGMALISTWIGYELSLISEAFNMIGQEVNTYGFFLETLPYRFYNIFMLAFVVITSITLREFGPMKDAQLRARDQGQLVEEDSHVETNDQVVEEGRKGSIWNAVLPIVMLIIFSFVGFYFDGRQALLAEGGSEIVSILENNPLSFVAIRETFGASDASLVLFQSALAASIIALIMGVWQKYFSLSDGIESWFDGMKSLMSTAGVLILAWSLSSVMGSLGTAEFLGLPIRDSHFTYLAPIHHFCLGFNYHLCYRYFLWDYGDPDAPCHPTSLQPRSGEQPTLVDHLSSRFGRGYFRGPLLTNLGHYHYVLHGGWVQFDPPRQNPIALCSDSRAYFDCLWLHPFSHGGSGLGLDSGCNCRPGCFGLLHRGAH

SEQ ID NO: 3427 - DNA, 504 bp, Alloiococcus otitidis
  CDS (64)..(501)
tggggagtttgggaacggcagaatttctcggtctcccaattagggacagtcatttcacctatcttgctcccatccatcatttttgccttgggttcaattatcacctttgctaccggtacttcctttgggactatggggatcctgatgccccttgccatcccactagcctacaacctagatccggggaacagccaactcttgttgaccacctcagcagccgttttggcaggggctattttaggggaccactcctcaccaatctcggacactaccattatgtcctccatgggggctgggtccaatttgatccaccacgtcagaacccaattgccttatgttctgacagtcgggcttatttcgattgtctttggttacatcccttcagccatgggggttccggtttgggtcttgattccggttgcaattgtcgtcctggttgttttggtttacttcataggggagcccattaatgtcaaagattccaataatatataccaagactaa

SEQ ID NO: 3428 - protein, 146 aa, Alloiococcus otitidis
MLPSIIFALGSIITFATGTSFGTMGILMPLAIPLAYNLDPGNSQLLLTTSAAVLAGAILGDHSSPISDTTIMSSMGAGSNLIHHVRTQLPYVLTVGLISIVFGYIPSAMGVPVWVLIPVAIVVLVVLVYFIGEPINVKDSNNIYQD

SEQ ID NO: 3429 - DNA, 885 bp, Alloiococcus otitidis
  CDS (13)..(882)
atgattaggattatgttagattcaggatcagaccaaaaccaagccttaagagaagcctacgatgttgaagtggttcccatgaccattattttgggccaggaccaatacttagatgacgaagattttagcttagaaaccctccatgcctatatgaggcagggaaagcaaccgcgaacgtctcaaattagcccccaaatggccatcgatcgttttgaagcggcagctaaggccggagacgatgtcatcttcatttccatatttaaacaattgtcagggacttaccaggttgccgtcaatgccatggaagatgtcaaggaccgctatcccaactttcaaggggcagtggttgactcccggtcagcagcaggggctgggaccattctttacttgcacggacaggaattgatcaaggctggctatgactttgaccaggtccaccagcaattagagcagtctgcccaggaactctccgtttatttagcagtggacgacttagactggttggtcaaagggggacggttgtcaaaaacggttgggaagatcggttccttgctcaaggtcaaacccttcttgagcattaacgacaaggggattaccaaggaaggggttgtccgggggagtgaccgggtctacaccaagatggcgaacactttcttggaagagattgaccgctatgaaggccaatatttgattgtctcccatgtggaccgctgggaaatggctgagaaggtcagagactacattattgaccagatcggccccgtcaacattggaatttttgaagtttcccctgttatttcctgtcacgtaggactaggcggagtaggggtctttggctacaagaaaaaacctgatcttttcgaaccagttaccttcaaatcttaa

SEQ ID NO: 3430 - protein, 290 aa, Alloiococcus otitidis
MLDSGSDQNQALREAYDVEVVPMTIILGQDQYLDDEDFSLETLHAYMRQGKQPRTSQISPQMAIDRFEAAAKAGDDVIFISIFKQLSGTYQVAVNAMEDVKDRYPNFQGAVVDSRSAAGAGTILYLHGQELIKAGYDFDQVHQQLEQSAQELSVYLAVDDLDWLVKGGRLSKTVGKIGSLLKVKPFLSINDKGITKEGVVRGSDRVYTKMANTFLEEIDRYEGQYLIVSHVDRWEMAEKVRDYIIDQIGPVNIGIFEVSPVISCHVGLGGVGVFGYKKKPDLFEPVTFKS

SEQ ID NO: 3431 - DNA, 885 bp, Alloiococcus otitidis; identical to SEQ ID NO: 3429
  CDS (1)..(882)

SEQ ID NO: 3432 - protein, 294 aa, Alloiococcus otitidis
MIRIMLDSGSDQNQALREAYDVEVVPMTIILGQDQYLDDEDFSLETLHAYMRQGKQPRTSQISPQMAIDRFEAAAKAGDDVIFISIFKQLSGTYQVAVNAMEDVKDRYPNFQGAVVDSRSAAGAGTILYLHGQELIKAGYDFDQVHQQLEQSAQELSVYLAVDDLDWLVKGGRLSKTVGKIGSLLKVKPFLSINDKGITKEGVVRGSDRVYTKMANTFLEEIDRYEGQYLIVSHVDRWEMAEKVRDYIIDQIGPVNIGIFEVSPVISCHVGLGGVGVFGYKKKPDLFEPVTFKS

SEQ ID NO: 3433 - DNA, 297 bp, Alloiococcus otitidis
  CDS (10)..(294)
acccggtctttgccccggaccaatgaatctttgataaagcctttatcatctaaggtcaatagcggtctgacttggagcatggaaccgactttgacgatcgtcttggggacccggcccccctttgccaaccactcaatatcgtcagcagcccataaacggccatgtcctgggctgatcggtccaattggtcccttatttgatcaaattcatagccagcctcgatcaaggcttggccgtgtaagaaaaggagggtgcctgctcctgaagctgaccggcagtccaccactgcccccttga

SEQ ID NO: 3434 - protein, 95 aa, Alloiococcus otitidis
MPRTNESLIKPLSSKVNSGLTWSMEPTLTIVLGTRPPFANHSISSAAHKRPCPGLIGPIGPLFDQIHSQPRSRLGRVRKGGCLLLKLTGSPPLPP

SEQ ID NO: 3435 - DNA, 615 bp, Alloiococcus otitidis
  CDS (34)..(612)
aatactcaaatcccttatgaagttgataggagaatggaagtcatgattaagataatgttggactccgcctcagaccagagtaagtctatgagacaaacttacgactttgaaaccatccccatgccgattatggtaggtagggaggagtatatcgacgatccaaatgtgaaagtagagacaatccaccagtttatgcgggagggcaagatgcctaagacggcccagattagcccccaagtagccgagacagcctttgaaaaacaagcccaggctggccacgatgtaatttttatctccatcttcaaaggattgtcagggtctatccaagttgcccaggaggctatgaaagaagttgaagaccgctatcctgacttcaagggggcagtggtggactgccggtcagcttcaggagcaggcaccctccttttcttacacggccaagccttgatcgaggctggctatgaatttgatcaaataagggaccaattggaccgatcagcccaggacatggccgtttatgggctgctgacgatattgagtggttggcaaaggggggccgggtccccaagacgatcgtcaaagtcggttccatgctccaagtcagaccgctattga

SEQ ID NO: 3436 - protein, 193 aa, Alloiococcus otitidis
MEVMIKIMLDSASDQSKSMRQTYDFETIPMPIMVGREEYIDDPNVKVETIHQFMREGKMPKTAQISPQVAETAFEKQAQAGHDVIFISIFKGLSGSIQVAQEAMKEVEDRYPDFKGAVVDCRSASGAGTLLFLHGQALIEAGYEFDQIRDQLDRSAQDMAVYGLLTILSGWQRGAGSPRRSSKSVPCSKSDRY

SEQ ID NO: 3437 - DNA, 456 bp, Alloiococcus otitidis
  CDS (121)..(453)
tcaaataagggaccaattggaccgatcagcccaggacatggccgtttatgggctgctgacgatattgagtggttggcaaaggggggccgggtccccaagacgatcgtcaaagtcggttccatgctccaagtcagaccgctattgaccttagatgataaaggctttatcaaagattcattggtccggggcaaagaccgggtttacatgaagatggcagacaagctcatcgaccatatttctccctaccaaggccagtacctacttatctcccatgttgggcggagggagatggctgagaaggtgagagattacattatgagtaaatatggtccggttaatattggtatttttgaagcttcaccggttatttcatgtcatattggtttaggaggtcttggagtttttgcttacaagactaaacctgaattatttgaaccggtgacgttcaactcttaa

SEQ ID NO: 3438 - protein, 111 aa, Alloiococcus otitidis
MLQVRPLLTLDDKGFIKDSLVRGKDRVYMKMADKLIDHISPYQGQYLLISHVGRREMAEKVRDYIMSKYGPVNIGIFEASPVISCHIGLGGLGVFAYKTKPELFEPVTFNS

SEQ ID NO: 3439 - DNA, 909 bp, Alloiococcus otitidis
  CDS (16)..(906)
aggagaagagatgaaatgattaaaattatgttagactctgcttcagaccagggtccggccttaagagagacttataaacttgttaacatcccgatgtcgattacggtaggtaaaaaggaatttatcgatgataatgacaacaactttaaagtagaaaccctccaccaatatatgcgtgagggtaaacaaccccatacggctcaaattagcccccaagtagccatggaaacctttgaggcggctgccaaagcaggcgatgatgttatcttcatttccatttccatccggctttctagttccattcaagttgccaaaaatgccatggaggaggtcaaagaccgctatcctaactttaagggagctgtagtggactgccggtcagcttctggagcagggacgcttctttttctacatgggcaagccctagttgaagctggttacaactttgaccaagtggaagctcagctgcaaaaatccgcccaagagatagcagtcttcgtggcagttgacgacatagactggctgataaaaggcggtcgggtgtctaaaacggtcgggagagttgggtctctgctccgggtcaagcccctcataagtatagatgatactggatttattcgcgacagtatcgtcagaggccgagaccgagtctataccaagatggttgaccgattgattgaccatatagcttcaccttatgaaggccaatatatcgtcgtctcccatgtggggcggccagatatggctgaaagagttaaaaactatattattgaccaatttggaccggttaatatcgggatttttgctgcctctcctgttattgccagccatattggcttgggtggcatggctgtttttggttacgagaaaaaaccagaattatttgaaccggtggctttcaaatcttaa

SEQ ID NO: 3440 - protein, 297 aa, Alloiococcus otitidis
MIKIMLDSASDQGPALRETYKLVNIPMSITVGKKEFIDDNDNNFKVETLHQYMREGKQPHTAQISPQVAMETFEAAAKAGDDVIFISISIRLSSSIQVAKNAMEEVKDRYPNFKGAVVDCRSASGAGTLLFLHGQALVEAGYNFDQVEAQLQKSAQEIAVFVAVDDIDWLIKGGRVSKTVGRVGSLLRVKPLISIDDTGFIRDSIVRGRDRVYTKMVDRLIDHIASPYEGQYIVVSHVGRPDMAERVKNYIIDQFGPVNIGIFAASPVIASHIGLGGMAVFGYEKKPELFEPVAFKS

SEQ ID NO: 3441 - DNA, 357 bp, Alloiococcus otitidis
  CDS (34)..(354)
gtaatatctggagtattttccttcttagcaataatgagtaagatttctttctcaggttctatttcgatgttaaagacccgcttggcttcagctgaaccagcaccccgagccttgataaaggttccgccattagcacccttgtcttcggctacccgcataacgtcccggccatcgccttggtcgacaattgtcacaattgcttggtacatgatttcctcttctccttctagttggtcttcttctggaacttggccaaaatcgactaagtgcttgctaacacctaagacattggaaatggaagttcgaaacgcaatgccaaaatttttcttgttcaagtttttgacttcgctaatgtaa

SEQ ID NO: 3442 - protein, 107 aa, Alloiococcus otitidis
MSKISFSGSISMLKTRLASAEPAPRALIKVPPLAPLSSATRITSRPSPWSTIVTIAWYMISSSPSSWSSSGTWPKSTKCLLTPKTLEMEVRNAMPKFFLFKFLTSLM

SEQ ID NO: 3443 - DNA, 699 bp, Alloiococcus otitidis
  CDS (43)..(696)
ggattagaggtgacaaaatgcacgaatgcattgaatgagtcaatggatttattattatttattgtaaaccctgataaagggcaaacagttataaatttagcctataaaaaagggattcgggccggcactatcttgcttggactcggtacagtccgcaactccattttaaagaaactcggtttggacaatagccacaaggaaattgtccttttattagcccctagccacaaggccaaagaaaccatggattacattagcgaagtcaaaaacttgaacaagaaaaattttggcattgcgtttcgaacttccatttccaatgtcttaggtgttagcaagcacttagtcgattttggccaagttccagaagaagaccaactagaaggagaagaggaaatcatgtaccaagcaattgtgacaattgtcgaccaaggcgatggccgggacgttatgcgggtagccgaagacaagggtgctaatggcggaacctttatcaaggctcggggtgctggttcagctgaagccaagcgggtctttaacatcgaaatagaacctgagaaagaaatcttactcattattgctaagaaggaaaatactccagatattactcaagctatcagtgaccatttgaatattgacgaaagaaatgctggtatacttttcaccgtagatcttagcgaaacacggggtctattcggctga

SEQ ID NO: 3444 - protein, 218 aa, Alloiococcus otitidis
MDLLLFIVNPDKGQTVINLAYKKGIRAGTILLGLGTVRNSILKKLGLDNSHKEIVLLLAPSHKAKETMDYISEVKNLNKKNFGIAFRTSISNVLGVSKHLVDFGQVPEEDQLEGEEEIMYQAIVTIVDQGDGRDVMRVAEDKGANGGTFIKARGAGSAEAKRVFNIEIEPEKEILLIIAKKENTPDITQAISDHLNIDERNAGILFTVDLSETRGLFG

SEQ ID NO: 3445 - DNA, 699 bp, Alloiococcus otitidis; identical to SEQ ID NO: 3443
  CDS (31)..(696)

SEQ ID NO: 3446 - protein, 222 aa, Alloiococcus otitidis
MNESMDLLLFIVNPDKGQTVINLAYKKGIRAGTILLGLGTVRNSILKKLGLDNSHKEIVLLLAPSHKAKETMDYISEVKNLNKKNFGIAFRTSISNVLGVSKHLVDFGQVPEEDQLEGEEEIMYQAIVTIVDQGDGRDVMRVAEDKGANGGTFIKARGAGSAEAKRVFNIEIEPEKEILLIIAKKENTPDITQAISDHLNIDERNAGILFTVDLSETRGLFG

SEQ ID NO: 3447 - DNA, 699 bp, Alloiococcus otitidis; identical to SEQ ID NO: 3443
  CDS (10)..(696)

SEQ ID NO: 3448 - protein, 229 aa, Alloiococcus otitidis
MTKCTNALNESMDLLLFIVNPDKGQTVINLAYKKGIRAGTILLGLGTVRNSILKKLGLDNSHKEIVLLLAPSHKAKETMDYISEVKNLNKKNFGIAFRTSISNVLGVSKHLVDFGQVPEEDQLEGEEEIMYQAIVTIVDQGDGRDVMRVAEDKGANGGTFIKARGAGSAEAKRVFNIEIEPEKEILLIIAKKENTPDITQAISDHLNIDERNAGILFTVDLSETRGLFG

SEQ ID NO: 3449 - DNA, 1509 bp, Alloiococcus otitidis
  CDS (1270)..(1506)
gaaaaactaatcccaattgaaaggggccatgtatttgtgaacatactaacagaaaagtttaaagaagtgctgacctcagttttacccatttacattattgtccttttaatttattttttcttgattgatatcccttcttccatcctactatcgttcacgatcggaaccattgtgattatcataggtttgaccactttcttaacaggggtagaagtcgggattagtccaattggggagtatatgggccgggggatagccaagtctaataaactaagcattttaattatctttggctttatccttggttttttgatctcagcttctgagccctctgttttagtcttaggccagcagctagaaaccatctcggatggattaatttcaagctttgccatggtaatggttatctctgtcggactcggggttatgattgtcctcggtttgatgcggattgtctataagtggtccttgcgtgccgtcttaaccacttcttatcttatcatctttggtttaaccttgatcagttccaatgaaatcattgctattgcttttgacgcatccggggcaacgacgggagaagttacggttccttttatcttatccctagctgctggtgtggccgtcttggaaagtaactccaagtcttcctctgccgattctttcggcctagttggggtcgcgtccgtcggggccatcattgccgtattgatcttcaacctcctcactccaagtggcggcgacctttccggctccttggacattggggtagcccaagagattaatatcgtagaacaatatgcctccaccttgatcgaagaagccattgatgtcttctttactctcctacctatcgttgtccttttttggattttccaaaagctacgactcaatatccccaagtctgaacttaaccggatttggaaggggactgtttatgtatacatcggacttgtcctctttatgaccggggtttacgcaggctttatggatatggggattattgttggctacaccttaggttctgaggatatgctagtggaacttagcctggttggggctgtcattggactagtaaccatcttggcagaaccagctgttaacgttttgacccaccagattgaagatgtcaccgctaacgctatccaccggaaaccggtcctagtggccttgtgcatcggagtctcttttgccatcttcctagccattatccggatgcttgtgcctggattagaattgtggcatatcctcctccccggctacatccttgtcttgatcctgcaatttttcgttcccaatgtctttgtagggatgtcttttgacgcaggtggtgtggcaactggtccattaaccgcaacctttatcctagcctttgtccaaggggcggcagaagccattcctcaagcaacggtaatcggcgaaggattcgggatgattgcccttgtcgcccttatgccgattttgaccctccaaattttaggctttatctactcaatccggagtaaggactaa

SEQ ID NO: 3450 - protein, 79 aa, Alloiococcus otitidis
MILQFFVPNVFVGMSFDAGGVATGPLTATFILAFVQGAAEAIPQATVIGEGFGMIALVALMPILTLQILGFIYSIRSKD

SEQ ID NO: 3451 - DNA, 1509 bp, Alloiococcus otitidis; identical to SEQ ID NO: 3449
  CDS (625)..(1506)

SEQ ID NO: 3452 - protein, 294 aa, Alloiococcus otitidis
MESNSKSSSADSFGLVGVASVGAIIAVLIFNLLTPSGGDLSGSLDIGVAQEINIVEQYASTLIEEAIDVFFTLLPIVVLFWIFQKLRLNIPKSELNRIWKGTVYVYIGLVLFMTGVYAGFMDMGIIVGYTLGSEDMLVELSLVGAVIGLVTILAEPAVNVLTHQIEDVTANAIHRKPVLVALCIGVSFAIFLAIIRMLVPGLELWHILLPGYILVLILQFFVPNVFVGMSFDAGGVATGPLTATFILAFVQGAAEAIPQATVIGEGFGMIALVALMPILTLQILGFIYSIRSKD

SEQ ID NO: 3453 - DNA, 1509 bp, Alloiococcus otitidis; identical to SEQ ID NO: 3449
  CDS (427)..(1506)

SEQ ID NO: 3454 - protein, 360 aa, Alloiococcus otitidis
MIVLGLMRIVYKWSLRAVLTTSYLIIFGLTLISSNEIIAIAFDASGATTGEVTVPFILSLAAGVAVLESNSKSSSADSFGLVGVASVGAIIAVLIFNLLTPSGGDLSGSLDIGVAQEINIVEQYASTLIEEAIDVFFTLLPIVVLFWIFQKLRLNIPKSELNRIWKGTVYVYIGLVLFMTGVYAGFMDMGIIVGYTLGSEDMLVELSLVGAVIGLVTILAEPAVNVLTHQIEDVTANAIHRKPVLVALCIGVSFAIFLAIIRMLVPGLELWHILLPGYILVLILQFFVPNVFVGMSFDAGGVATGPLTATFILAFVQGAAEAIPQATVIGEGFGMIALVALMPILTLQILGFIYSIRSKD

SEQ ID NO: 3455 - DNA, 1509 bp, Alloiococcus otitidis; identical to SEQ ID NO: 3449
  CDS (241)..(1506)

SEQ ID NO: 3456 - protein, 422 aa, Alloiococcus otitidis
MGRGIAKSNKLSILIIFGFILGFLISASEPSVLVLGQQLETISDGLISSFAMVMVISVGLGVMIVLGLMRIVYKWSLRAVLTTSYLIIFGLTLISSNEIIAIAFDASGATTGEVTVPFILSLAAGVAVLESNSKSSSADSFGLVGVASVGAIIAVLIFNLLTPSGGDLSGSLDIGVAQEINIVEQYASTLIEEAIDVFFTLLPIVVLFWIFQKLRLNIPKSELNRIWKGTVYVYIGLVLFMTGVYAGFMDMGIIVGYTLGSEDMLVELSLVGAVIGLVTILAEPAVNVLTHQIEDVTANAIHRKPVLVALCIGVSFAIFLAIIRMLVPGLELWHILLPGYILVLILQFFVPNVFVGMSFDAGGVATGPLTATFILAFVQGAAEAIPQATVIGEGFGMIALVALMPILTLQILGFIYSIRSKD

SEQ ID NO: 3457 - DNA, 1509 bp, Alloiococcus otitidis; identical to SEQ ID NO: 3449
  CDS (121)..(1506)

SEQ ID NO: 3458 - protein, 462 aa, Alloiococcus otitidis
MIDIPSSILLSFTIGTIVIIIGLTTFLTGVEVGISPIGEYMGRGIAKSNKLSILIIFGFILGFLISASEPSVLVLGQQLETISDGLISSFAMVMVISVGLGVMIVLGLMRIVYKWSLRAVLTTSYLIIFGLTLISSNEIIAIAFDASGATTGEVTVPFILSLAAGVAVLESNSKSSSADSFGLVGVASVGAIIAVLIFNLLTPSGGDLSGSLDIGVAQEINIVEQYASTLIEEAIDVFFTLLPIVVLFWIFQKLRLNIPKSELNRIWKGTVYVYIGLVLFMTGVYAGFMDMGIIVGYTLGSEDMLVELSLVGAVIGLVTILAEPAVNVLTHQIEDVTANAIHRKPVLVALCIGVSFAIFLAIIRMLVPGLELWHILLPGYILVLILQFFVPNVFVGMSFDAGGVATGPLTATFILAFVQGAAEAIPQATVIGEGFGMIALVALMPILTLQILGFIYSIRSKD

SEQ ID NO: 3459 - DNA, 1509 bp, Alloiococcus otitidis; identical to SEQ ID NO: 3449
  CDS (37)..(1506)

SEQ ID NO: 3460 - protein, 490 aa, Alloiococcus otitidis
MNILTEKFKEVLTSVLPIYIIVLLIYFFLIDIPSSILLSFTIGTIVIIIGLTTFLTGVEVGISPIGEYMGRGIAKSNKLSILIIFGFILGFLISASEPSVLVLGQQLETISDGLISSFAMVMVISVGLGVMIVLGLMRIVYKWSLRAVLTTSYLIIFGLTLISSNEIIAIAFDASGATTGEVTVPFILSLAAGVAVLESNSKSSSADSFGLVGVASVGAIIAVLIFNLLTPSGGDLSGSLDIGVAQEINIVEQYASTLIEEAIDVFFTLLPIVVLFWIFQKLRLNIPKSELNRIWKGTVYVYIGLVLFMTGVYAGFMDMGIIVGYTLGSEDMLVELSLVGAVIGLVTILAEPAVNVLTHQIEDVTANAIHRKPVLVALCIGVSFAIFLAIIRMLVPGLELWHILLPGYILVLILQFFVPNVFVGMSFDAGGVATGPLTATFILAFVQGAAEAIPQATVIGEGFGMIALVALMPILTLQILGFIYSIRSKD

SEQ ID NO: 3461 - DNA, 951 bp, Alloiococcus otitidis
  CDS (100)..(948)
tatacaatatttcaatcctattactataaaatcggctctatccaagccaggcttggatgtggtatactaggtgacgatgacatatttggagggaagttcatgttctggattctactgattctgattgttgcattagccatctatttttattaccaaaaccgattcattcaagtcaataaatacaaaatgaccattgccaacttacccagccagttgcggggaaagaaaattgtccaactatctgatatccacttcagggataatatgaacaatggctatgtcaaatccatcttaaaaaaagtggctagccaagaccctgacttgatcgtgctcacaggagataccctccatgctagcttggaatttctggaagagaccccggtcgaagattttcttctcgacttaaatgacttagccccaacttacttggttactggtaaccacgatatttctaatcccaactttgatgagttttcagccttggtttctcaaaccggctgtgaacttttaattgatgatgcagtctatgctcattttaaagatagccagcctcaagaagacttggttttaatgggctttgccgagcgggggggtatggagaatgtcccagatcctatcttgaataacatcgacctagaagcggggatggaggctaaaccaaaaattcttttggcccaccacccagaattttttgaagcatacctggccgatcctaacaaggcaccagacctgacatttgctgggcacagtcacgggggccaggtcatcctaccttacctgggcggattatttaacaagtcacaaggctttttcccccactatgattacgggatatttattggccaagaccagccaactaagcgaatgatcgtcaaccggggtttgggtaactctggctttcctatgcggtttaacaaccggtgcgagattataacccttacccttaactaa

SEQ ID NO: 3462 - protein, 283 aa, Alloiococcus otitidis
MFWILLILIVALAIYFYYQNRFIQVNKYKMTIANLPSQLRGKKIVQLSDIHFRDNMNNGYVKSILKKVASQDPDLIVLTGDTLHASLEFLEETPVEDFLLDLNDLAPTYLVTGNHDISNPNFDEFSALVSQTGCELLIDDAVYAHFKDSQPQEDLVLMGFAERGGMENVPDPILNNIDLEAGMEAKPKILLAHHPEFFEAYLADPNKAPDLTFAGHSHGGQVILPYLGGLFNKSQGFFPHYDYGIFIGQDQPTKRMIVNRGLGNSGFPMRFNNRCEIITLTLN

SEQ ID NO: 3463 - DNA, 1200 bp, Alloiococcus otitidis
  CDS (157)..(1197)
ttgatttggaataggaggattgtcatgaaagacaagttcaaacccttgtttgaatcagtgaaattagacagtggaagtgtattagccaaccgttttgtcatggcgcctatggtagtagagggatccacataccagggaacgcctggaccagaagatttggcttacttcaaaagacggaataaaacggctggtcttctgattacaggagctgctgcagttggtcccttaggcaatgctttcggtaacggcttatcgatcttggatgacagtcaaatacccgcctggaaagacttggctcagacaatgaaggatagtggcaacaaggctgtcctgcaaattttccacccaggtcggcaggccaagtattcctataccgaccagggcaaggttgtaggcccatctgatgctgactttgactttttagattacccggtaaccggcttaagtagccaggaagttcaagactatgtccactactttggccaggctgctagacgggctgtggaagctggctttgatggggtcgaaatccacggggccaaccactacttgatccaccagttcttttccaagtcttccaatttccgccaagatgattggggtggcagcctggaaaaaagagcccactttgcactagctgttgcccaagaagtcaaggaccaggtgaaaaaagctggcaagtctgactttatcattggctaccgctttagcccagaagaagtccacgatgaccaagtcggctatgacctggaagagagtctttacttggtggacaaactggctgacttgggactggactacatccacacctcccagttcggtcccttatctttcaagaaaaaagcagaagtcggcaagtacagtggccaagtcatcaacagtgtagttaaagaaaagctggctggtcgagccctactggtaggggctggtgacattagtgaccccgacaaagccctagaagctagccaatacctagaccttctagccatgggggccagtgctatcctcaagcctgacctggttcaaaccatcaaggctggccgagaccaagactaccagttagaagtgaaagaagaggacttagctgaccttgccttgccggaccgtttctaccggatggcaggatcacttggcgtcaaccaatcattttcagaccaacttgttgctcgtctaaaagaaaaaccggaccatctcaagtaa

SEQ ID NO: 3464 - protein, 347 aa, Alloiococcus otitidis
MAYFKRRNKTAGLLITGAAAVGPLGNAFGNGLSILDDSQIPAWKDLAQTMKDSGNKAVLQIFHPGRQAKYSYTDQGKVVGPSDADFDFLDYPVTGLSSQEVQDYVHYFGQAARRAVEAGFDGVEIHGANHYLIHQFFSKSSNFRQDDWGGSLEKRAHFALAVAQEVKDQVKKAGKSDFIIGYRFSPEEVHDDQVGYDLEESLYLVDKLADLGLDYIHTSQFGPLSFKKKAEVGKYSGQVINSVVKEKLAGRALLVGAGDISDPDKALEASQYLDLLAMGASAILKPDLVQTIKAGRDQDYQLEVKEEDLADLALPDRFYRMAGSLGVNQSFSDQLVARLKEKPDHLK

SEQ ID NO: 3465 - DNA, 1200 bp, Alloiococcus otitidis; identical to SEQ ID NO: 3463
  CDS (25)..(1197)

SEQ ID NO: 3466 - protein, 391 aa, Alloiococcus otitidis
MKDKFKPLFESVKLDSGSVLANRFVMAPMVVEGSTYQGTPGPEDLAYFKRRNKTAGLLITGAAAVGPLGNAFGNGLSILDDSQIPAWKDLAQTMKDSGNKAVLQIFHPGRQAKYSYTDQGKVVGPSDADFDFLDYPVTGLSSQEVQDYVHYFGQAARRAVEAGFDGVEIHGANHYLIHQFFSKSSNFRQDDWGGSLEKRAHFALAVAQEVKDQVKKAGKSDFIIGYRFSPEEVHDDQVGYDLEESLYLVDKLADLGLDYIHTSQFGPLSFKKKAEVGKYSGQVINSVVKEKLAGRALLVGAGDISDPDKALEASQYLDLLAMGASAILKPDLVQTIKAGRDQDYQLEVKEEDLADLALPDRFYRMAGSLGVNQSFSDQLVARLKEKPDHLK

SEQ ID NO: 3467 - DNA, 1200 bp, Alloiococcus otitidis; identical to SEQ ID NO: 3463
  CDS (1)..(1197)

SEQ ID NO: 3468 - protein, 399 aa, Alloiococcus otitidis
MIWNRRIVMKDKFKPLFESVKLDSGSVLANRFVMAPMVVEGSTYQGTPGPEDLAYFKRRNKTAGLLITGAAAVGPLGNAFGNGLSILDDSQIPAWKDLAQTMKDSGNKAVLQIFHPGRQAKYSYTDQGKVVGPSDADFDFLDYPVTGLSSQEVQDYVHYFGQAARRAVEAGFDGVEIHGANHYLIHQFFSKSSNFRQDDWGGSLEKRAHFALAVAQEVKDQVKKAGKSDFIIGYRFSPEEVHDDQVGYDLEESLYLVDKLADLGLDYIHTSQFGPLSFKKKAEVGKYSGQVINSVVKEKLAGRALLVGAGDISDPDKALEASQYLDLLAMGASAILKPDLVQTIKAGRDQDYQLEVKEEDLADLALPDRFYRMAGSLGVNQSFSDQLVARLKEKPDHLK

SEQ ID NO: 3469 - DNA, 429 bp, Alloiococcus otitidis
  CDS (28)..(426)
ctaggtttagaaaggataaaagaaaatatgaaaataaaagctaattgggaagggaagaaaaggatcaaggtggaaaacgaagccggccaccaagtccatatggatgatgaagtagacaaggggggcgaccggtctgctatgaccccggctgaactcttaaccgcttctttagcgggctgtatgggaatttccatcatgacttccttgctcaactacaaggagcctgtagaagagttaagcttagacttggattttgtcaaaagtgacaagccgccaaaccgggtagaagagattaaaatgatcatcaatattaagaccgaaattcccaaagaccgaattgatcggatcgttaagctgtctcatgagaaatactgcaccgtctccaatacccttaaggctgaaacgtcttatgagatcaactacctataa

SEQ ID NO: 3470 - protein, 133 aa, Alloiococcus otitidis
MKIKANWEGKKRIKVENEAGHQVHMDDEVDKGGDRSAMTPAELLTASLAGCMGISIMTSLLNYKEPVEELSLDLDFVKSDKPPNRVEEIKMIINIKTEIPKDRIDRIVKLSHEKYCTVSNTLKAETSYEINYL

SEQ ID NO: 3471 - DNA, 1296 bp, Alloiococcus otitidis
  CDS (34)..(1293)
tatccatggagaaatatttattttatcataaaaatgggggaatacgaaatggttctaaacaattttgatcatttaatcgacaagtatgctgaactctttgtcaaaaccggggtcaatgtccaagagggtcacacagtagcaatcaatgcctctgtagaaaacgcccaattggcccgggctatcgccaagacagcctaccaaaaaggggctcgtgaagtcttgattgactgggcagacgacaccttagcccggctgaagttcagccatgaatccaaagaaaccttgaccgaggttcccgaataccggattgccaaaatgaactacctattggaccatggagctagccggatcagcatcgttgatgatgacccagataacttggctggtttagatggcgaaaaaattgcagccacccaaaaagctctaggtcaagcgatgagacccatgcgggatgccacccaggccaataaagtctcctggaccgtagccgctgcagctagtccagcctgggcagccaaagtcttccctgacctagacagccaggaagaacaagttgatgctctttgggatgccatctttaaggcgatccacctctatgacgatgacccagttgctagctgggaggaaaaagacaagaccctagagagcaaggcggatgaactcaatgaagccaatttcaccgccctccattataaagcaccgggtactgacctaacagtaggtctacctaaaggccaccactgggaaggtgccggcagctttaatgctcggggtgagcgcttcatggctaatatgccaaccgaggaagtctttaccgcccctgatgctaagcggattgacggagtcgtcaaatcaaccaagcccctcagttatgccgggtctatcattgacggcatggaattccactttgaaaatggtcatgtcaccaaggtaacagctgaacgtggccaagaagtgatcgaaaaacttctggaattagatgaagggtcctccagtctcggtgaagtagctctcgtgcctcacgagtcccctatttcccaatctggccttattttctttagcaccctctttgacgagaatgcctccaaccacctggcacttggttcggcttatgcctttaacctagaaggcgggaccgaaatgtcagaagcagaattaaaagaagctggcttgaaccggtcaaccacccacgtggactttatgattgggtctgacaaaatggatatcgacggaatcaaggaagatggtagcaaggttcccgttttcagaaatggaacttgggctgacaacttctaa

SEQ ID NO: 3472 - protein, 420 aa, Alloiococcus otitidis
MGEYEMVLNNFDHLIDKYAELFVKTGVNVQEGHTVAINASVENAQLARAIAKTAYQKGAREVLIDWADDTLARLKFSHESKETLTEVPEYRIAKMNYLLDHGASRISIVDDDPDNLAGLDGEKIAATQKALGQAMRPMRDATQANKVSWTVAAAASPAWAAKVFPDLDSQEEQVDALWDAIFKAIHLYDDDPVASWEEKDKTLESKADELNEANFTALHYKAPGTDLTVGLPKGHHWEGAGSFNARGERFMANMPTEEVFTAPDAKRIDGVVKSTKPLSYAGSIIDGMEFHFENGHVTKVTAERGQEVIEKLLELDEGSSSLGEVALVPHESPISQSGLIFFSTLFDENASNHLALGSAYAFNLEGGTEMSEAELKEAGLNRSTTHVDFMIGSDKMDIDGIKEDGSKVPVFRNGTWADNF

SEQ ID NO: 3473 - DNA, 567 bp, Alloiococcus otitidis
  CDS (25)..(564)
ataatacaaaaggagatattttttatggcacgtagaaaaaccataatgaaagaacacatcctcaaggctgccgagaacttactgaaaagagaagggattgatagcctgacagcccgaaacgtcgccaatgagctcgattgttccacccaacccatctacaatgaatttaaaaatatggagcagttaaagtcggaagtcattgccaatacagaagaattttttaccaataaattaagtgcaactgctattgaaaatgctagcttgcaaagtgtttgtgaagactatataaagtttgctgaggatgaatcgcccctctttcggtccatgtacatgtacaaaaatgcttattcaggcgacctccacgataatatgggcaaaaccatgattgacttgattgataagtatacgggagcttcctgtgataccttgcagttgtggaaaaatctctaccctctcttgtttggtctcgcttccctgatagccctaggtaaagttcaaacaaaagatattaacctctcaaattatgttagtgcttacatcaaaaccgctgtcgatttagccaaataa

SEQ ID NO: 3474 - protein, 180 aa, Alloiococcus otitidis
MARRKTIMKEHILKAAENLLKREGIDSLTARNVANELDCSTQPIYNEFKNMEQLKSEVIANTEEFFTNKLSATAIENASLQSVCEDYIKFAEDESPLFRSMYMYKNAYSGDLHDNMGKTMIDLIDKYTGASCDTLQLWKNLYPLLFGLASLIALGKVQTKDINLSNYVSAYIKTAVDLAK

SEQ ID NO: 3475 - DNA, 453 bp, Alloiococcus otitidis
  CDS (4)..(450)
atcatggtaaaagcaatgatagtatacgctagtttgaccggtaatactgaagaaggggctgaaattttagaagaagcctttgaagaagcaggagttgacgtggaagtagttgaagctagctttgctgacccggaggacttccaggactatgatatcgtcattgtcggcacctatacctatggcccagatggcaatttgcctgaggaaattgttgacttttatgaagaattggaagaagtcgacttgtctggcaaagtctttggcacctttggctcaggagatgacttctacgaaaaatactgcaagtcggtagatgattttgaccagcaattggcccaggccggtgccaaccagggattccaaccagtcaagtacaacctcatccctggtcaagaagccattaacgacttaaacgccatggctcaagcccttattgaccaagcccaaaactaa

SEQ ID NO: 3476 - protein, 149 aa, Alloiococcus otitidis
MVKAMIVYASLTGNTEEGAEILEEAFEEAGVDVEVVEASFADPEDFQDYDIVIVGTYTYGPDGNLPEEIVDFYEELEEVDLSGKVFGTFGSGDDFYEKYCKSVDDFDQQLAQAGANQGFQPVKYNLIPGQEAINDLNAMAQALIDQAQN

SEQ ID NO: 3477 - DNA, 807 bp, Alloiococcus otitidis
  CDS (88)..(804)
cgaaaaatttgttataatatgaaaggtaaaataatagagaggaaggaaagcatgataacacgaaaatcaccgcgggaaatcgaccagatggacaagtcaggtgatgtcttggcggaaattcacgaaggcttgcgtgattttattaaaccaggtgtaactggagaagaaatcaaccagtttgccatggacattatggaaaaacatggggcaactgccgaacaaatcggctatcaaggctatgaatatgccacctgtgttagtatcaacgacgaaatctgccatggattcccaagaaagaccaaactgaaagaaggcgatttggtcaaggtagatatggtagtcaacctggatggggccttgtcggactcctgctgggcttatgtagtcggccagggcagtgaccaggtcaaccacctgatggaagtaacccgaaaggctctctacaagggaattgaacaagcccaagttggaaaccggatcggtgacattggggcggctatccaagaatacgttgaatccgaagacctaactgtggtccgggaatttgtgggtcacggcattggccctacccttcacgaagagccaagcgtgcctcactttggccaggctggcaagggcaaacgcttgaaagaaggcatggtgatcaccatcgagcccatggtgaataccggaacctggcagtcaagcctggatgacaatggctggacagcccgaaccaaagatggtggcctgtcttgtcagtatgaacacaccctagccattaccaagaatggtccaagaattttaaccaaacaagaaggccagtaa

SEQ ID NO: 3478 - protein, 239 aa, Alloiococcus otitidis
MDKSGDVLAEIHEGLRDFIKPGVTGEEINQFAMDIMEKHGATAEQIGYQGYEYATCVSINDEICHGFPRKTKLKEGDLVKVDMVVNLDGALSDSCWAYVVGQGSDQVNHLMEVTRKALYKGIEQAQVGNRIGDIGAAIQEYVESEDLTVVREFVGHGIGPTLHEEPSVPHFGQAGKGKRLKEGMVITIEPMVNTGTWQSSLDDNGWTARTKDGGLSCQYEHTLAITKNGPRILTKQEGQ

SEQ ID NO: 3479 - DNA, 807 bp, Alloiococcus otitidis; identical to SEQ ID NO: 3477
  CDS (19)..(804)

SEQ ID NO: 3480 - protein, 262 aa, Alloiococcus otitidis
MKGKIIERKESMITRKSPREIDQMDKSGDVLAEIHEGLRDFIKPGVTGEEINQFAMDIMEKHGATAEQIGYQGYEYATCVSINDEICHGFPRKTKLKEGDLVKVDMVVNLDGALSDSCWAYVVGQGSDQVNHLMEVTRKALYKGIEQAQVGNRIGDIGAAIQEYVESEDLTVVREFVGHGIGPTLHEEPSVPHFGQAGKGKRLKEGMVITIEPMVNTGTWQSSLDDNGWTARTKDGGLSCQYEHTLAITKNGPRILTKQEGQ

SEQ ID NO: 3481 - DNA, 891 bp, Alloiococcus otitidis
  CDS (376)..(888)
tcattaggggaggatggtttttctaaggaggccagaatggtagataaaattttaaaaaagttgaaatttgactgggtaacagaggtcattgatatggcctcagaagggaagatctggcagtattcaacctttatcacctattatatattttttaccctttttcccttgtttgtgggggttatcaatgccttccagttccacaacattgatatcactattatccaccgcctcctccacaatgtcttaccttctgttttgagcgaacgcttggtcaatgacgtcaatgtgatttatgaaaattcccactttgggatctacctgatcgctttgatctcatcgatctggaccattagctggattaccaactctatcgtcatgggcctcaaccaagcctatggggtgggctaccgtaggaatattttggtcctgcgtttgcttgccttttcctttaccattggtctggcagtttggtttggactcgtttcggtctttctccagcaagttcccttaaataatatccaggtcattatcattttattattggtaaccttttttacttcctggtttattttctctaccgttcccaatgccaagcaaaaatactaccaaaccctgcctggggccgtcattgtcactttgtctttcttggtggcagggatcatttatgtccttctaatgggcctcttgccgtctgactccatcctctttaccatgctgggggcttttatgatcatctttgccattacccaaaagcttgccttctttatcttggtgggaggcctagccaaccgctactttattgaaagaagagaaggtcaggtgacagctaaaaatgaagacagttctttcctcaagcttttgatccggttaaatattttacaagaaaagtaa

SEQ ID NO: 3482 - protein, 171 aa, Alloiococcus otitidis
MGLNQAYGVGYRRNILVLRLLAFSFTIGLAVWFGLVSVFLQQVPLNNIQVIIILLLVTFFTSWFIFSTVPNAKQKYYQTLPGAVIVTLSFLVAGIIYVLLMGLLPSDSILFTMLGAFMIIFAITQKLAFFILVGGLANRYFIERREGQVTAKNEDSSFLKLLIRLNILQEK

SEQ ID NO: 3483 - DNA, 891 bp, Alloiococcus otitidis; identical to SEQ ID NO: 3481
  CDS (37)..(888)

SEQ ID NO: 3484 - protein, 284 aa, Alloiococcus otitidis
MVDKILKKLKFDWVTEVIDMASEGKIWQYSTFITYYIFFTLFPLFVGVINAFQFHNIDITIIHRLLHNVLPSVLSERLVNDVNVIYENSHFGIYLIALISSIWTISWITNSIVMGLNQAYGVGYRRNILVLRLLAFSFTIGLAVWFGLVSVFLQQVPLNNIQVIIILLLVTFFTSWFIFSTVPNAKQKYYQTLPGAVIVTLSFLVAGIIYVLLMGLLPSDSILFTMLGAFMIIFAITQKLAFFILVGGLANRYFIERREGQVTAKNEDSSFLKLLIRLNILQEK

SEQ ID NO: 3485 - DNA, 720 bp, Alloiococcus otitidis
  CDS (13)..(717)
agagggataaggatggcagacttccaagatataaagcttatctatgaggataaccacctgatcgtggttgataaaccccttaatatgccctgccaggaagatgcctctggtgacccagacctcttaaatgaagtcaaggaatatatacgggttaagtacgacaagcctggccgggtttatttgggcttggtccaccggcttgaccggccaactgggggcctgatggtctttgccaagacttctaaagcagctagtcgcttgtcagaaaccatccggaagggaaatatggaccggacctacttagcagtccttcagggtagccatttgcctcaaacaggccaatttgaagactacctctacaaggaccaggctaataaccaggtctttgtggtagaagaaggcaccccaaaagccaagtttgctagtttgacctaccaagttctagaagtcaaaaaggacctaagcctaatccaagtccaactccaaactggccggtcccatcaaatccgggtccagtttgctagccggggctgcccattatggggggaccaaaaatatggcagttactttagccaacccggccaagacttagccctctatgcttcaagcctgaccttcccccatgtcaccaaaggagacaagcggactttcaccagccaaccccagcaagctagccaacgggaaccctgggcttactttgactacttccacaagagttaa

SEQ ID NO: 3486 - protein, 235 aa, Alloiococcus otitidis
MADFQDIKLIYEDNHLIVVDKPLNMPCQEDASGDPDLLNEVKEYIRVKYDKPGRVYLGLVHRLDRPTGGLMVFAKTSKAASRLSETIRKGNMDRTYLAVLQGSHLPQTGQFEDYLYKDQANNQVFVVEEGTPKAKFASLTYQVLEVKKDLSLIQVQLQTGRSHQIRVQFASRGCPLWGDQKYGSYFSQPGQDLALYASSLTFPHVTKGDKRTFTSQPQQASQREPWAYFDYFHKS

SEQ ID NO: 3487 - DNA, 1050 bp, Alloiococcus otitidis
  CDS (25)..(1047)
tactatttaacggagggaacatttatgtcaattctagttacgggtggagctggctatataggctcacacaccttggttgaacttttaaatcaggattacgatgtagtagcagtcgataacttctccaattccagcccccaagtcttgaagcggttagaccaaattactggcaagccttttcgcttctaccaactggatatcaatgataagcaagctttgaccaacctctttaaaaaagaaacaattgaagcggtcatccacctagccggttataaggcggtgggcgaatccgtagcccaaccggtcaagtactatcaaaacaatgtgggcggcactgccattttaatggaggttatgaaccaatttaactgtaaaaagatggtcttctcctccagtgccactgtttatggcttagacaatgagcccccactgactgaggatatgcccttgtccacgattaacccttatgggcggaccaagctctttatcgaggaaatcttacaagaccaagtccaagctgaccaaaactggtctggggtcatcttgcgctacttcaaccccatcggagcccatgaatcaggcctgattggagaagacccaactgacgtcccatctaacatcatgccctatatctcccaggtagctattggcaagttggaccagctctccatttatggcaaggactacgacacccctgacggaacgggagtccgggactacatccatgtagtagacctagcccgaggccacctcaatgcactagaagaagtcttggacacaaaagaccaccttgaaatctataacttggggaccgggaaaggttattcagttttagacctggtccaaagctttacggagaccaaccaagtccaagtcccctaccagttcgttgaccggagaccgggtgacgtggctacttcctatgcttcagctgacaaggccaaggaaggtttaagctggcaggcagaatatgacttaagtcggatggtcaaggatagctggcgttggcaaaaacaaaatcccaatggctaccaggctgaagagggataa

SEQ ID NO: 3488 - protein, 341 aa, Alloiococcus otitidis
MSILVTGGAGYIGSHTLVELLNQDYDVVAVDNFSNSSPQVLKRLDQITGKPFRFYQLDINDKQALTNLFKKETIEAVIHLAGYKAVGESVAQPVKYYQNNVGGTAILMEVMNQFNCKKMVFSSSATVYGLDNEPPLTEDMPLSTINPYGRTKLFIEEILQDQVQADQNWSGVILRYFNPIGAHESGLIGEDPTDVPSNIMPYISQVAIGKLDQLSIYGKDYDTPDGTGVRDYIHVVDLARGHLNALEEVLDTKDHLEIYNLGTGKGYSVLDLVQSFTETNQVQVPYQFVDRRPGDVATSYASADKAKEGLSWQAEYDLSRMVKDSWRWQKQNPNGYQAEEG

SEQ ID NO: 3489 - DNA, 258 bp, Alloiococcus otitidis
  CDS (13)..(255)
agtgattatttattgcattatggccattttaatggcttttgccttaacgccccttgtcaggcgcttggccttcaagctaggggcagtggactatcccaaccaaagacgggtgaatacccagcccatgccttccttgggtggcctggcgatttatgtcacctttttctttatcatttttttcctccaacccatccagctcagacaatccctgcccctttttatcgcagcgaccatcgtggtagcaactggtttgattga

SEQ ID NO: 3490 - protein, 81 aa, Alloiococcus otitidis
MHYGHFNGFCLNAPCQALGLQARGSGLSQPKTGEYPAHAFLGWPGDLCHLFLYHFFPPTHPAQTIPAPFYRSDHRGSNWFD

SEQ ID NO: 3491 - DNA, 1110 bp, Alloiococcus otitidis
  CDS (682)..(1107)
catatgtataacatgtatgaagtgattatttattgcattatggccattttaatggcttttgccttaacgccccttgtcaggcgcttggccttcaagctaggggcagtggactatcccaaccaaagacgggtgaatacccagcccatgccttccttgggtggcctggcgatttatgtcacctttttctttatcatttttttcctccaacccatccagctcagacaatccctgcccctttttatcgcagcgaccatcgtggtagcaactggtttgattgatgatattaaagaaatttctcccaaggccaagttgcttggtatcgtgatcgcagccctctttattgtcttgatcaatgacttaacggtggcccggtttaccttgccccttattggacctgttaacctgccattttggttgggtctcccggctaccttgctgtgggttgtggccatcaccaatgccattaacctggtggacggcttggacggtttggccagtggcgtgtctgccatagccttgacgaccatgggcttgatcagtttcttcttcctcggtgctaacagctacttggcgaccattttaatctatagcctggttgggtccatcctaggctttttaccttggaattttaacccggctcggatttatttaggggataccggggccttatttttaggctttatgatttcggtcttttccctgtatagcttaaagaatgttaccctggtcagtttaatcatccccatcgtcatcttaggaatgccaattacagatacggtttatgctatgctaaggcggaaattaaataaaaaaccaatttcctctgcggataaaaaccacatgcaccaccgactgatgtctttgggcttgactcaccgacaaaccgtcttgtttatctatgctattgcggctatcttttccatcacagccctcttgtacccaatctcatcctatctcggtaatatcttaattacccttttactcttacttggggtggagatctttgtggaaatgatcggcctagtcggggaagatcgacggcccttagtgaaaaccattcgtgcttttgcccggaagattaatagaaaggggaaaaaaaaccatgactaa

SEQ ID NO: 3492 - protein, 142 aa, Alloiococcus otitidis
MISVFSLYSLKNVTLVSLIIPIVILGMPITDTVYAMLRRKLNKKPISSADKNHMHHRLMSLGLTHRQTVLFIYAIAAIFSITALLYPISSYLGNILITLLLLLGVEIFVEMIGLVGEDRRPLVKTIRAFARKINRKGKKNHD

SEQ ID NO: 3493 - DNA, 1110 bp, Alloiococcus otitidis; identical to SEQ ID NO: 3491
  CDS (106)..(1107)

SEQ ID NO: 3494 - protein, 334 aa, Alloiococcus otitidis
MDYPNQRRVNTQPMPSLGGLAIYVTFFFIIFFLQPIQLRQSLPLFIAATIVVATGLIDDIKEISPKAKLLGIVIAALFIVLINDLTVARFTLPLIGPVNLPFWLGLPATLLWVVAITNAINLVDGLDGLASGVSAIALTTMGLISFFFLGANSYLATILIYSLVGSILGFLPWNFNPARIYLGDTGALFLGFMISVFSLYSLKNVTLVSLIIPIVILGMPITDTVYAMLRRKLNKKPISSADKNHMHHRLMSLGLTHRQTVLFIYAIAAIFSITALLYPISSYLGNILITLLLLLGVEIFVEMIGLVGEDRRPLVKTIRAFARKINRKGKKNHD

SEQ ID NO: 3495 - DNA, 1110 bp, Alloiococcus otitidis; identical to SEQ ID NO: 3491
  CDS (4)..(1107)

SEQ ID NO: 3496 - protein, 368 aa, Alloiococcus otitidis
MYNMYEVIIYCIMAILMAFALTPLVRRLAFKLGAVDYPNQRRVNTQPMPSLGGLAIYVTFFFIIFFLQPIQLRQSLPLFIAATIVVATGLIDDIKEISPKAKLLGIVIAALFIVLINDLTVARFTLPLIGPVNLPFWLGLPATLLWVVAITNAINLVDGLDGLASGVSAIALTTMGLISFFFLGANSYLATILIYSLVGSILGFLPWNFNPARIYLGDTGALFLGFMISVFSLYSLKNVTLVSLIIPIVILGMPITDTVYAMLRRKLNKKPISSADKNHMHHRLMSLGLTHRQTVLFIYAIAAIFSITALLYPISSYLGNILITLLLLLGVEIFVEMIGLVGEDRRPLVKTIRAFARKINRKGKKNHD

SEQ ID NO: 3497 - DNA, 807 bp, Alloiococcus otitidis
  CDS (52)..(804)
aaaccattcgtgcttttgcccggaagattaatagaaaggggaaaaaaaaccatgactaatgtacagcaagccttggtttccattattatgccagcccataatgcggaaggctttatcagccagtccatccagtcagtcctcaaccaaacatacgacaattgggaattggtcatcaccgatgatgcttcaaccgaccagactgttccggtcatccaatcctttgccgaccccagaataaaattgcttcaattgcaggaaaataagggagcagctattgctcgcaataccgccattgaacaagcaagaggcgactacctggcctttttggacagcgacgacttttggcacaaggataaattgacccgacagattgcctttatggaaagcgaagacatcctattttcatcaacggagtatggcaatgttgattcagacggcaatttgctttctgtcacagccaaccacgaccagttagactatgagggtttgctcaagtactgccccggcaattcaactgtgatctacaatgccaaggtcttaggcaagttttatatcccagatatcaaaaaacgcaacgactttgtcatgtggctccgggtgatcaaaaaagccaagaccctctatggcctgaaagaaaccttaacctactaccgggtacgggatgacagtttatctaaaaacaagcctgccttggttaaataccagtggcgggtctaccggcaaatcgaacacctcagcctagctaaatcagcctacctacttggccacaaggtcttaacggttaaatttggtttgaataagaagtga

SEQ ID NO: 3498 - protein, 251 aa, Alloiococcus otitidis
MTNVQQALVSIIMPAHNAEGFISQSIQSVLNQTYDNWELVITDDASTDQTVPVIQSFADPRIKLLQLQENKGAAIARNTAIEQARGDYLAFLDSDDFWHKDKLTRQIAFMESEDILFSSTEYGNVDSDGNLLSVTANHDQLDYEGLLKYCPGNSTVIYNAKVLGKFYIPDIKKRNDFVMWLRVIKKAKTLYGLKETLTYYRVRDDSLSKNKPALVKYQWRVYRQIEHLSLAKSAYLLGHKVLTVKFGLNKK

SEQ ID NO: 3499 - DNA, 807 bp, Alloiococcus otitidis; identical to SEQ ID NO: 3497
  CDS (16)..(804)

SEQ ID NO: 3500 - protein, 263 aa, Alloiococcus otitidis
MPGRLIERGKKTMTNVQQALVSIIMPAHNAEGFISQSIQSVLNQTYDNWELVITDDASTDQTVPVIQSFADPRIKLLQLQENKGAAIARNTAIEQARGDYLAFLDSDDFWHKDKLTRQIAFMESEDILFSSTEYGNVDSDGNLLSVTANHDQLDYEGLLKYCPGNSTVIYNAKVLGKFYIPDIKKRNDFVMWLRVIKKAKTLYGLKETLTYYRVRDDSLSKNKPALVKYQWRVYRQIEHLSLAKSAYLLGHKVLTVKFGLNKK

SEQ ID NO: 3501 - DNA, 807 bp, Alloiococcus otitidis; identical to SEQ ID NO: 3497
  CDS (10)..(804)

SEQ ID NO: 3502 - protein, 265 aa, Alloiococcus otitidis
MLLPGRLIERGKKTMTNVQQALVSIIMPAHNAEGFISQSIQSVLNQTYDNWELVITDDASTDQTVPVIQSFADPRIKLLQLQENKGAAIARNTAIEQARGDYLAFLDSDDFWHKDKLTRQIAFMESEDILFSSTEYGNVDSDGNLLSVTANHDQLDYEGLLKYCPGNSTVIYNAKVLGKFYIPDIKKRNDFVMWLRVIKKAKTLYGLKETLTYYRVRDDSLSKNKPALVKYQWRVYRQIEHLSLAKSAYLLGHKVLTVKFGLNKK

SEQ ID NO: 3503 - DNA, 1062 bp, Alloiococcus otitidis
  CDS (574)..(1059)
gatatggatgtaaccttgagtgaaatcaagcggtttttaaaagaccatctaaaatttatcaccattacaacaattattttcaccttggtcctggctggtttactgacccttgtagatggcctaagttccagtgaaagcagtgaattggaaaatgaactagagtatgatgaggttttggaggctgattcggcttatttccagttttatgctgaatttgaagatggggacttatttactaatggtaaattggttgaagattacttaaaattgaacactattaatgagaatgtatataaagaaacaaatatcaatatcccggaaattgaggatcgaatcaacgaagactatcccgaattcgataatgagtttacagtagttgaagttactcgtaattctgattcgaatatctttacaattactgttaatttaggaaatgaaagtaataatttaactttagcagaatattattatgatctcttgatggaagggaatgtggattttttagagaataaaagactattttccttggttgaacctcaattagtaagtgaagtttttgaggaagaggtactaatggaaacaggtttacaaataaccccggtaaatgttatcaaaaatacctttatcgccttaattgtttccctagtcttagcagctggcctggccttgttgaaggctatttttggtcaaaagctagactatagttttgcctacaatgtagaagatgaggtcgaatttttggtttataacccagctaagtcgaatagtcagcttttgcattcctttatcagccaacccaaggacgctaaaaaaattgttcttctggaaggctatgggaatcaggaagaaaataatttgtctgtcgaccaagttctccaagagatcgatactgacaaggtcttagtgcttgattccttgacttctttggaccaggaaggagaatttgcagaaattgacctaatcgttcaaccctaccgaactgaccgaacttggtaccaagaccaagttgaattgatgggcttgtacaatatcaaaatgaaagtagttcaaattaatggctaa

SEQ ID NO: 3504 - protein, 162 aa, Alloiococcus otitidis
METGLQITPVNVIKNTFIALIVSLVLAAGLALLKAIFGQKLDYSFAYNVEDEVEFLVYNPAKSNSQLLHSFISQPKDAKKIVLLEGYGNQEENNLSVDQVLQEIDTDKVLVLDSLTSLDQEGEFAEIDLIVQPYRTDRTWYQDQVELMGLYNIKMKVVQING

SEQ ID NO: 3505 - DNA, 1062 bp, Alloiococcus otitidis; identical to SEQ ID NO: 3503
  CDS (4)..(1059)

SEQ ID NO: 3506 - protein, 352 aa, Alloiococcus otitidis
MDVTLSEIKRFLKDHLKFITITTIIFTLVLAGLLTLVDGLSSSESSELENELEYDEVLEADSAYFQFYAEFEDGDLFTNGKLVEDYLKLNTINENVYKETNINIPEIEDRINEDYPEFDNEFTVVEVTRNSDSNIFTITVNLGNESNNLTLAEYYYDLLMEGNVDFLENKRLFSLVEPQLVSEVFEEEVLMETGLQITPVNVIKNTFIALIVSLVLAAGLALLKAIFGQKLDYSFAYNVEDEVEFLVYNPAKSNSQLLHSFISQPKDAKKIVLLEGYGNQEENNLSVDQVLQEIDTDKVLVLDSLTSLDQEGEFAEIDLIVQPYRTDRTWYQDQVELMGLYNIKMKVVQING

SEQ ID NO: 3507 - DNA, 1089 bp, Alloiococcus otitidis
  CDS (16)..(1086)
cgaagtggtggaagtatgatttggttattccatattagtatgatcacaatcttgctcattgtggctaagttatttaaaaaggataatttttttatctactcttcttttatctatgccatttttatttttgggcaaaggtggatgacgggaacagattttcctttttatttgagatattatttgactgattacgataatgtagaacctggttactattttattcaaaaaatattgaccgaaggcaatttatactttggtattctcatatttattgtctttgctataacggtctacaacatttatcgtttcattagcaagattaataaacatacggttttaatgatttttttatttttaatctcagaaatattttttgcccagatgtcgcaaattcgtcaatttttggctgtgagtttctacatgaatagttactattatgcctttcaaaaacaatatttaagatcgggcttaggaattattgcaggactgttatttcatgattcaattatatttcttgttccatttctattaatccatttgaacctagataagattaaaactatttatctacttatattgagtggggttttacctttaattgatttaactttgttacttaaattacctatttttaaccgatattctcactatgtaggtggacagtttgatgtagacttgtcaatctttcactattttagattttatatcttgcttgctattgttctatattttttatggactatagaccggttagggaaaggacgggttgagcagatgatcttgaatggcttagtctttaactttttgctttacggcatgagtttccagtttgccctttttttaagagtcagcatgtatttcaaaatttttgaacttgttttcctagcatattactttaaacaaacaaagtttgtatcaaatataatagctgtagcaactgtttcttttctttttgttgggatttatagtgggttgggtatagtagacccttatagtatttctgactaccaatttagaccaataaggatttttgaaaatcgtagtcatgatcgcttaagagaagaaatagatgaatttattaataattaa

SEQ ID NO: 3508 - protein, 357 aa, Alloiococcus otitidis
MIWLFHISMITILLIVAKLFKKDNFFIYSSFIYAIFIFGQRWMTGTDFPFYLRYYLTDYDNVEPGYYFIQKILTEGNLYFGILIFIVFAITVYNIYRFISKINKHTVLMIFLFLISEIFFAQMSQIRQFLAVSFYMNSYYYAFQKQYLRSGLGIIAGLLFHDSIIFLVPFLLIHLNLDKIKTIYLLILSGVLPLIDLTLLLKLPIFNRYSHYVGGQFDVDLSIFHYFRFYILLAIVLYFLWTIDRLGKGRVEQMILNGLVFNFLLYGMSFQFALFLRVSMYFKIFELVFLAYYFKQTKFVSNIIAVATVSFLFVGIYSGLGIVDPYSISDYQFRPIRIFENRSHDRLREEIDEFINN

SEQ ID NO: 3509 - DNA, 813 bp, Alloiococcus otitidis
  CDS (10)..(810)
ggagattttatggatttagaagttctactatctacgatgaacaaaaataatttagattttttaaacaatatcaacttatcatcaaattgcgttatagtgaatcaaaataaagataattatagtgtaaaagatgtgcaatatggcagctgtaatttaaggttagttaatagtaaagatatagggctaagtagaagccgaaatctagctataaaaaattcccgcgcagacatttgtgtgatagctgacgatgatattgtttataagaagaattatgtaaatattattaaacaggcttacatggataatccgcatgctgatattattgctttccaagtttctcgtattaatagtaaagaccgaaagaaatcttttcgaaaaagaaaaagttgggatggctatttaactagcatgaaaatttcgtctgttgagattacttttaaacgaaaatcaattgttaataatggaatatcttttaatacagattttggcgctggtacgtattttagtcatggagaagaaaatatatttttatacgactgcttagatcatggacttaagattctttatttacctattgaggtgggtcaggttgatgtttctaattcaagctggtttcaaggttataatgcctcttatttccataccttaggggctaaattttataatatgtctcaaattacctatccagtactaatttttcaatttgctattcgaaagtataaactttataaagaggaacttagctttttccaagctatttatttaatgaaacaaggtgttgatatctataaaaagaaaatgggaatcaggtag

SEQ ID NO: 3510 - protein, 267 aa, Alloiococcus otitidis
MDLEVLLSTMNKNNLDFLNNINLSSNCVIVNQNKDNYSVKDVQYGSCNLRLVNSKDIGLSRSRNLAIKNSRADICVIADDDIVYKKNYVNIIKQAYMDNPHADIIAFQVSRINSKDRKKSFRKRKSWDGYLTSMKISSVEITFKRKSIVNNGISFNTDFGAGTYFSHGEENIFLYDCLDHGLKILYLPIEVGQVDVSNSSWFQGYNASYFHTLGAKFYNMSQITYPVLIFQFAIRKYKLYKEELSFFQAIYLMKQGVDIYKKKMGIR

SEQ ID NO: 3511 - DNA, 1434 bp, Alloiococcus otitidis
  CDS (13)..(1431)
agagaaaatgttatggataaaacatacgaattaaataaggaaaagaaaagtgaattaaaaaattgtatacatattgctaactggtatattcactattgtgaagctcctatttatacatctattagtgatagaagaagttgtgcaatattaggagaatttttccatatagaaaaacctgaattaactgaacaagatattacaaatgaaataataaagctaaagaactttgaagatgttataattttcagcaaatatttgttgggtcggtttgttatattttattttgattatgatcattcagtgaaaattctcccagatgccactacaactattccagtttattatacaaataaagctggtaaagaatatatctcttcagatagtcacttgataaaaaataaatttgattttcaattttctgaaactagtattaacattaaagaagcagctgataatcaacatcctttaccatataacataactatgtttgaggaaataaaggttcttatcccaaatcattattatgattcaaataccggagaaatgcatagatattttcctttggacgatgtaagccatatttcactgctcaatgctactgaaaaaacaatatatgtcattagaaatgtactctcttttatattaaaaagaaaaaaattatcactacctttaactgctggagttgatagtagaactgtactatcatttctaaaaaattatataaacgatatacctacttttactttttatagtacaaacgatacaggtgatttagagatagctaaggatatttctcataaaatgaatttttttcacaaagggcttaaacgaaaaaaacttacagatgatgaaataagttattttagtgataagctagatggaaaccacaaagtaggcgtattaaatgatgccttaacacttaagaaatcagcttttaaagatcgcagttttttaactggtgatattattccccttgctaaaagtaattttgggaaaaatttaccagaaaaatgggctactgcaagttatttggttacaaaaacccataattattctagagaaaacaaagaatacgtcaaaaagtggttgaaagacgtaaaagaataccattatttgtctatatatgatttatttttctgggagtatagatttggaagatggtttcctaatagtgtaattaattatgatatttggacagatcctttttacctttttaattgccgatacttgattgaattatggttaagtattcctagaaaccaaagaactaaatactctcttcatgaagaaataataaaaactaattggcccgaattgctaaaaataccgatcaatccacatgaaaaatatttgaataaatttttttcaaatcaatacctttattatttaggatcttttggaaaatattacttacaaggtttaaaaagaaaataa

SEQ ID NO: 3512 - protein, 473 aa, Alloiococcus otitidis
MDKTYELNKEKKSELKNCIHIANWYIHYCEAPIYTSISDRRSCAILGEFFHIEKPELTEQDITNEIIKLKNFEDVIIFSKYLLGRFVIFYFDYDHSVKILPDATTTIPVYYTNKAGKEYISSDSHLIKNKFDFQFSETSINIKEAADNQHPLPYNITMFEEIKVLIPNHYYDSNTGEMHRYFPLDDVSHISLLNATEKTIYVIRNVLSFILKRKKLSLPLTAGVDSRTVLSFLKNYINDIPTFTFYSTNDTGDLEIAKDISHKMNFFHKGLKRKKLTDDEISYFSDKLDGNHKVGVLNDALTLKKSAFKDRSFLTGDIIPLAKSNFGKNLPEKWATASYLVTKTHNYSRENKEYVKKWLKDVKEYHYLSIYDLFFWEYRFGRWFPNSVINYDIWTDPFYLFNCRYLIELWLSIPRNQRTKYSLHEEIIKTNWPELLKIPINPHEKYLNKFFSNQYLYYLGSFGKYYLQGLKRK

SEQ ID NO: 3513 - DNA, 996 bp, Alloiococcus otitidis
  CDS (220)..(993)
gtgaaaactttggaaaatgaacgtattccttctcgagctgcccagggttcgccctactaccggcgtaggagagggtgcctgccaggctgtggttgtggtggctgcctcttcttcgttttaattgcctttttcctagctcttatagtggggctatttgcttaccgggatattcggtcaacttctgatgccatccacgaagaagtggaagaccaagaagtgatgcgggatgatgccgttgacctcggcgatggcgatcctttttcagtcctattgatggggatcgacacaggcgaagaaggccgggtcgaccaaggccggtctgacaccatgatggtggtaacggttaatcctcacacccaacaatccactatcgtgtctattccacgagatacttataccgaaatagcaggtagggggactatggataaaatcaaccatgcctatgcctttggtgggacctccatggcggttaacaccgtgcaaaagctatttgacattccgattgactactatgtttccatcaatatggaaggacttgaacaaatagttgatgcccttgatgggataacccttgtgcctgattcaactttccaacaaagtggctacagctttactcaaggccaggaaacccagctagatgggggagcagccctagcctactctaggatgcggaagcaggacccagaaggggattacggccggcaaaagcggcaaagacaagtggtcatggctattgtggatgagctggcttctattgaatccatcttgaactaccgaagcgtgctttcggttttagaccaaaatatggcaactaatatggcctttgacgaaatggtaactatttttaccaattatcgggatgcttccggtaatacccgtcaagaacaattgtcaggcgaagggacaaggatagatggtgtctactacgatattgtcagtgatgccgaaatcaaccgggttcagaccctcttgaaagaagaccttgaaattaactaa

SEQ ID NO: 3514 - protein, 258 aa, Alloiococcus otitidis
MRDDAVDLGDGDPFSVLLMGIDTGEEGRVDQGRSDTMMVVTVNPHTQQSTIVSIPRDTYTEIAGRGTMDKINHAYAFGGTSMAVNTVQKLFDIPIDYYVSINMEGLEQIVDALDGITLVPDSTFQQSGYSFTQGQETQLDGGAALAYSRMRKQDPEGDYGRQKRQRQVVMAIVDELASIESILNYRSVLSVLDQNMATNMAFDEMVTIFTNYRDASGNTRQEQLSGEGTRIDGVYYDIVSDAEINRVQTLLKEDLEIN

SEQ ID NO: 3515 - DNA, 996 bp, Alloiococcus otitidis; identical to SEQ ID NO: 3513
  CDS (145)..(993)

SEQ ID NO: 3516 - protein, 283 aa, Alloiococcus otitidis
MGLFAYRDIRSTSDAIHEEVEDQEVMRDDAVDLGDGDPFSVLLMGIDTGEEGRVDQGRSDTMMVVTVNPHTQQSTIVSIPRDTYTEIAGRGTMDKINHAYAFGGTSMAVNTVQKLFDIPIDYYVSINMEGLEQIVDALDGITLVPDSTFQQSGYSFTQGQETQLDGGAALAYSRMRKQDPEGDYGRQKRQRQVVMAIVDELASIESILNYRSVLSVLDQNMATNMAFDEMVTIFTNYRDASGNTRQEQLSGEGTRIDGVYYDIVSDAEINRVQTLLKEDLEIN

SEQ ID NO: 3517 - DNA, 996 bp, Alloiococcus otitidis; identical to SEQ ID NO: 3513
  CDS (10)..(993)

SEQ ID NO: 3518 - protein, 328 aa, Alloiococcus otitidis
MENERIPSRAAQGSPYYRRRRGCLPGCGCGGCLFFVLIAFFLALIVGLFAYRDIRSTSDAIHEEVEDQEVMRDDAVDLGDGDPFSVLLMGIDTGEEGRVDQGRSDTMMVVTVNPHTQQSTIVSIPRDTYTEIAGRGTMDKINHAYAFGGTSMAVNTVQKLFDIPIDYYVSINMEGLEQIVDALDGITLVPDSTFQQSGYSFTQGQETQLDGGAALAYSRMRKQDPEGDYGRQKRQRQVVMAIVDELASIESILNYRSVLSVLDQNMATNMAFDEMVTIFTNYRDASGNTRQEQLSGEGTRIDGVYYDIVSDAEINRVQTLLKEDLEIN

SEQ ID NO: 3519 - DNA, 996 bp, Alloiococcus otitidis; identical to SEQ ID NO: 3513
  CDS (1)..(993)

SEQ ID NO: 3520 - protein, 331 aa, Alloiococcus otitidis
MKTLENERIPSRAAQGSPYYRRRRGCLPGCGCGGCLFFVLIAFFLALIVGLFAYRDIRSTSDAIHEEVEDQEVMRDDAVDLGDGDPFSVLLMGIDTGEEGRVDQGRSDTMMVVTVNPHTQQSTIVSIPRDTYTEIAGRGTMDKINHAYAFGGTSMAVNTVQKLFDIPIDYYVSINMEGLEQIVDALDGITLVPDSTFQQSGYSFTQGQETQLDGGAALAYSRMRKQDPEGDYGRQKRQRQVVMAIVDELASIESILNYRSVLSVLDQNMATNMAFDEMVTIFTNYRDASGNTRQEQLSGEGTRIDGVYYDIVSDAEINRVQTLLKEDLEIN

SEQ ID NO: 3521 - DNA, 1185 bp, Alloiococcus otitidis
  CDS (4)..(1182)
aggatgatagacatgtcaaaaatcgcagttgcaggaatgggttatgtgggtttggccaatgctgtcttactagcccaaaacaatgaagttgtcgctttagatattgtaaaagagaaagtcgacctgattaatgacagaaagtctcctattgtcgactctgatatctcagactacttaaccaataaagacttggaccttgtagcgactactgatccaaaagtagcctacggtcagtcaccagactatgtggtgattgctgccccaaccaactacgatgaaaaaagccactactttgatacttcagctgtggaagacgttatcgaaacggttctaaaatatgctccagaagccgttatgatagttaagtcaaccatccccgtcggctacactgaagatgtcaaggccaagtatgagaccgataatatcatcttttctccagaatttttacgggaaggtaaggctttatatgacaacctttatcctagccgaattataatgggggaagaaagtgaccgggcccgccactttgctagcttgctggctgaaggagccttaaaagaagacatcccacaattgtttgtcggtgcaactgaggccgaagccgtcaaactcttctccaatacctacctagccctccgtgtggcctactttaatgagttggactcttacgctgaagttcgtggcctagatactaaggccattattgacggggtcggcttagatccaaggatcggtgaccactacaacaacccttcctttggttacgggggctactgcctacccaaggatactaagcaactcttggccaactatgaagatgttcccaacaatattatccaagctatagtggatgccaaccggactcggaaagactttattgccgaccagatcttagataaagatcctcaagtggttgggatttaccgcttgaccatgaagtcagggtcagataacttccgtcaatcagccatccaaggggttatgaaacggatcaaggctaaaggggtagaagtggtcgtttacgaaccaaccttagatgaagacaagttctttaactctagggtcctaaaagacttggatgccttcaaagaagaggcggacgtcatcattgccaaccgtatggcagatgacctagaagacgttaaagacaaggtatacacccgggacctttacaaaaataattaa

SEQ ID NO: 3522 - protein, 393 aa, Alloiococcus otitidis
MIDMSKIAVAGMGYVGLANAVLLAQNNEVVALDIVKEKVDLINDRKSPIVDSDISDYLTNKDLDLVATTDPKVAYGQSPDYVVIAAPTNYDEKSHYFDTSAVEDVIETVLKYAPEAVMIVKSTIPVGYTEDVKAKYETDNIIFSPEFLREGKALYDNLYPSRIIMGEESDRARHFASLLAEGALKEDIPQLFVGATEAEAVKLFSNTYLALRVAYFNELDSYAEVRGLDTKAIIDGVGLDPRIGDHYNNPSFGYGGYCLPKDTKQLLANYEDVPNNIIQAIVDANRTRKDFIADQILDKDPQVVGIYRLTMKSGSDNFRQSAIQGVMKRIKAKGVEVVVYEPTLDEDKFFNSRVLKDLDAFKEEADVIIANRMADDLEDVKDKVYTRDLYKNN

SEQ ID NO: 3523 - DNA, 966 bp, Alloiococcus otitidis
  CDS (148)..(963)
gctgaagatatgagacagagaaattacaatatcgacgtcttaaaagggctagccattctttcagtaatcttactccatacccttccatggtcaatccggttccgggtgggggctccctaccatatttggcaggcggtcccaatttttatggtactagtaggttataattttgccaagtcggcccaggtcaagggaagggagagcttaggacaactctaccaaggcaagctgatttggagacgcttggttaagattatccagccctttgtcctagttatgcttgttcggttagtcttagagctagttctctatcaaagacttgaccttgccaattttttgaccgacctcttcttaggggatattgactttgggggttattacatcccgattatggtccaatctatctttctaaaccctatactgtactggttaatccggcaaaatactaagcaaaataccctttggcttttggtcttgtccttagccttggactggggcttgaaccttgccggattgtggggcagcctttaccggattttgattgtccgctaccttttcgccattgtcttaggcatgtggctagccttagctgaggaaagggttcagttaaaatggctacttgctctagccggattgagcctggtctatattaccggagtctattattttgacctaaccactccattggaaacatactggcaggcccagcacggcccagcttatttttggaccttactcctagtctttttagggctacatgtctattatgctaaaccagaccactggctaggtcgtccccttatttggcttggccaaacgtcttatcctatctttttaagccaaatgctttacttctggttaatgagtcagctaaccagtccaagtaatctaggattgtctctcatctttaatttaattatctgtgtttttttaggtaaaattctagaaaaatttacacaaacttaa

SEQ ID NO: 3524 - protein, 272 aa, Alloiococcus otitidis
MVLVGYNFAKSAQVKGRESLGQLYQGKLIWRRLVKIIQPFVLVMLVRLVLELVLYQRLDLANFLTDLFLGDIDFGGYYIPIMVQSIFLNPILYWLIRQNTKQNTLWLLVLSLALDWGLNLAGLWGSLYRILIVRYLFAIVLGMWLALAEERVQLKWLLALAGLSLVYITGVYYFDLTTPLETYWQAQHGPAYFWTLLLVFLGLHVYYAKPDHWLGRPLIWLGQTSYPIFLSQMLYFWLMSQLTSPSNLGLSLIFNLIICVFLGKILEKFTQT

SEQ ID NO: 3525 - DNA, 966 bp, Alloiococcus otitidis; identical to SEQ ID NO: 3523
  CDS (10)..(963)

SEQ ID NO: 3526 - protein, 318 aa, Alloiococcus otitidis
MRQRNYNIDVLKGLAILSVILLHTLPWSIRFRVGAPYHIWQAVPIFMVLVGYNFAKSAQVKGRESLGQLYQGKLIWRRLVKIIQPFVLVMLVRLVLELVLYQRLDLANFLTDLFLGDIDFGGYYIPIMVQSIFLNPILYWLIRQNTKQNTLWLLVLSLALDWGLNLAGLWGSLYRILIVRYLFAIVLGMWLALAEERVQLKWLLALAGLSLVYITGVYYFDLTTPLETYWQAQHGPAYFWTLLLVFLGLHVYYAKPDHWLGRPLIWLGQTSYPIFLSQMLYFWLMSQLTSPSNLGLSLIFNLIICVFLGKILEKFTQT

SEQ ID NO: 3527 - DNA, 1485 bp, Alloiococcus otitidis
  CDS (466)..(1482)
atggagattgacaaagcaatgccatcattaaaaaaccaggccgtaaacgggacgaaatggactacagcccggaccatactaaccgctattaccggcccaattttactaattgttaaaacccgcaacctatcccctgaggaattcggtgtcatggctattatcaatatttttattgggattattagtgttttagaaaattttggttttaatacggccattatccgtaaagatgaagtaaccaaggatgaacggtcttctttgtttatcttacaaataatgatttctatctttttggcctcattattggttatttcttcaccattgattgctagcttatttaatatgccacctttaaacgacttgctacctgttttaagtttgtctattctttttaacagtccggttattttattcactgccttcttagagaaagaatttcagtttaaagcagtttcaatcatccacatgggtcgagaacttgttttgctaatttcgaccaccattttgttccaggtattgagtcaaccactctatgctgtagttattggacaaatcttagccgttggttttatggctattggaataacaattgccacttttagtttcgaccttttacacttgcgtctccattttaagcttgacgatatcaagccttatttcaaatttgggattgttgttggctttcaaaaagttgtcatacaattgacccacaatgttgatgaaatgattattggctttttcttaccagaatcagtactaggctattaccattttgctaaaaaccttttaaataaatttcgacaactattaactgtatctttttctaaggtgcttttaccagtactatctaaagtaaaatatgaaaaagaacgtttgataagagggtataaccaaatttcttcttatatagctacggttaccttgcctatttttacaggtattgctttaacaactaattcttttatccccatcttttttgacgaagaatggttagcttcttctaattttttcataatattagctattagctatattccctatattattagtgattcaataggcactgatcttttgtattcaatcaacaaaccgaaattagccctagccattgactttgtcacaaacttagcatatattcttcttctgctcttggtatcttggctacagattggtctataccctattgtaattttatatggtttatatatgctggttaaatccattgtcacccaacactatgtttaccagcagtttaaccggtcatttttggaatatctaaaactctttaccggtttgattgctagtaccttgattatggtggccgttgtgctcctagcccaaaatgctgtattgaacgacatgagtgtttatgtagactttattgtcagcgtgattttaggagtcatctcctatgtcgccagcgtttacctcttcgagaaaaaaaccttccacgaccttgttggcatggtagccaaccgtgtttaa

SEQ ID NO: 3528 - protein, 339 aa, Alloiococcus otitidis
MGRELVLLISTTILFQVLSQPLYAVVIGQILAVGFMAIGITIATFSFDLLHLRLHFKLDDIKPYFKFGIVVGFQKVVIQLTHNVDEMIIGFFLPESVLGYYHFAKNLLNKFRQLLTVSFSKVLLPVLSKVKYEKERLIRGYNQISSYIATVTLPIFTGIALTTNSFIPIFFDEEWLASSNFFIILAISYIPYIISDSIGTDLLYSINKPKLALAIDFVTNLAYILLLLLVSWLQIGLYPIVILYGLYMLVKSIVTQHYVYQQFNRSFLEYLKLFTGLIASTLIMVAVVLLAQNAVLNDMSVYVDFIVSVILGVISYVASVYLFEKKTFHDLVGMVANRV

SEQ ID NO: 3529 - DNA, 1485 bp, Alloiococcus otitidis; identical to SEQ ID NO: 3527
  CDS (1)..(1482)

SEQ ID NO: 3530 - protein, 494 aa, Alloiococcus otitidis
MEIDKAMPSLKNQAVNGTKWTTARTILTAITGPILLIVKTRNLSPEEFGVMAIINIFIGIISVLENFGFNTAIIRKDEVTKDERSSLFILQIMISIFLASLLVISSPLIASLFNMPPLNDLLPVLSLSILFNSPVILFTAFLEKEFQFKAVSIIHMGRELVLLISTTILFQVLSQPLYAVVIGQILAVGFMAIGITIATFSFDLLHLRLHFKLDDIKPYFKFGIVVGFQKVVIQLTHNVDEMIIGFFLPESVLGYYHFAKNLLNKFRQLLTVSFSKVLLPVLSKVKYEKERLIRGYNQISSYIATVTLPIFTGIALTTNSFIPIFFDEEWLASSNFFIILAISYIPYIISDSIGTDLLYSINKPKLALAIDFVTNLAYILLLLLVSWLQIGLYPIVILYGLYMLVKSIVTQHYVYQQFNRSFLEYLKLFTGLIASTLIMVAVVLLAQNAVLNDMSVYVDFIVSVILGVISYVASVYLFEKKTFHDLVGMVANRV

SEQ ID NO: 3531 - DNA, 414 bp, Alloiococcus otitidis
  CDS (43)..(411)
cttttgatagaatatggaagattagaaaatagaggtgacgtaatggattatcggattaagaaaactttgtggatacttttggcagccttgatcatctttccggtggttattctgctaacaggggacttgtcgtcaatcggcaaggggcttctccacggccttctcaccctggtctttttggtgatggtcttttcagtttggtcctcccttagacccattacttggaaaaaagttggcctgaccatcttgtgggctgtggtcttttattttggccttcccattgctatccaattggtatcgggctttccaatcgttttaaaagggattgcccacttattagtcattatcctctttatagctgccttcctttggatttggtatgacgaaagaaaggccccgcattataggggatag

SEQ ID NO: 3532 - protein, 123 aa, Alloiococcus otitidis
MDYRIKKTLWILLAALIIFPVVILLTGDLSSIGKGLLHGLLTLVFLVMVFSVWSSLRPITWKKVGLTILWAVVFYFGLPIAIQLVSGFPIVLKGIAHLLVIILFIAAFLWIWYDERKAPHYRG

SEQ ID NO: 3533 - DNA, 414 bp, Alloiococcus otitidis; identical to SEQ ID NO: 3531
  CDS (4)..(411)

SEQ ID NO: 3534 - protein, 136 aa, Alloiococcus otitidis
MIEYGRLENRGDVMDYRIKKTLWILLAALIIFPVVILLTGDLSSIGKGLLHGLLTLVFLVMVFSVWSSLRPITWKKVGLTILWAVVFYFGLPIAIQLVSGFPIVLKGIAHLLVIILFIAAFLWIWYDERKAPHYRG

SEQ ID NO: 3535 - DNA, 1185 bp, Alloiococcus otitidis
  CDS (13)..(1182)
ccaaaagaggtgatgattgtgaaacttgcactatttactgatacctatgtgccagatgtgaatggggttgcccttaccctaaaaagatgggctgactacttaaagaaccagggccaccaggtcaaggtctttgccccagaaagcaaggaaaagaaagattccagcgaccatattatccgctacaagagttacccctttttcctgtaccctgacttagaagccgccattgccaacccccttgaaatcaaggcaaaactggaccgtttcaagccagaccttatccatgtggctacccccttcaatttgggtgtcttgggccggcgatacgccgtcaagtatggtgtcccctttgtggcttcctaccacaccaattttgaccaatatttaaagtcttataacctggattgggctaaagggatcttaaacttttacctcaactggttccaccaagcttgccaggctgtttttgcgccatcatccgttacggctgaccagctaaaagaacaaggctatcccaatgtcaagatttggcccagaggggtggaccaccaccattttaagccagccaaggtcaaagactgggccaagcatgaagcccaggccaaattcaagctagaaaaaaacaagcttaccattttatatgtgggtcgcttagctacggaaaagtccttggatgtcttgattgataccctcaaagaaatcccgccccacctcctctacaagctgcaagtcaatatcgtgggcgacggtcccatgcgacaagaaattaaaaggcaggccagagaatttgacctccccatcaacttacttggcttccagcaaggggataacttgtccctcttataccaggcaggagatatctttttcttcccttctgccactgaaacctttggtaatgttgttttagaagccctagcaagtggcctgccggttatcggggccaaggctggaggagttaaagacttagtcaagcaagcccacaatggcatcctctgccctcctggagaggtggaagcctttttagacgccctcttatttttaatgaacaatgcttccgtccgccagtattacgctaaaaatgcccgggcctttgctctcaagcaaagttgggaccagattatgaaagaattattggaagagctccaagacctagtagacaaccaagctttttttaaccaagcctga

SEQ ID NO: 3536 - protein, 390 aa, Alloiococcus otitidis
MIVKLALFTDTYVPDVNGVALTLKRWADYLKNQGHQVKVFAPESKEKKDSSDHIIRYKSYPFFLYPDLEAAIANPLEIKAKLDRFKPDLIHVATPFNLGVLGRRYAVKYGVPFVASYHTNFDQYLKSYNLDWAKGILNFYLNWFHQACQAVFAPSSVTADQLKEQGYPNVKIWPRGVDHHHFKPAKVKDWAKHEAQAKFKLEKNKLTILYVGRLATEKSLDVLIDTLKEIPPHLLYKLQVNIVGDGPMRQEIKRQAREFDLPINLLGFQQGDNLSLLYQAGDIFFFPSATETFGNVVLEALASGLPVIGAKAGGVKDLVKQAHNGILCPPGEVEAFLDALLFLMNNASVRQYYAKNARAFALKQSWDQIMKELLEELQDLVDNQAFFNQA

SEQ ID NO: 3537 - DNA, 1185 bp, Alloiococcus otitidis; identical to SEQ ID NO: 3535
  CDS (10)..(1182)

SEQ ID NO: 3538 - protein, 391 aa, Alloiococcus otitidis
MMIVKLALFTDTYVPDVNGVALTLKRWADYLKNQGHQVKVFAPESKEKKDSSDHIIRYKSYPFFLYPDLEAAIANPLEIKAKLDRFKPDLIHVATPFNLGVLGRRYAVKYGVPFVASYHTNFDQYLKSYNLDWAKGILNFYLNWFHQACQAVFAPSSVTADQLKEQGYPNVKIWPRGVDHHHFKPAKVKDWAKHEAQAKFKLEKNKLTILYVGRLATEKSLDVLIDTLKEIPPHLLYKLQVNIVGDGPMRQEIKRQAREFDLPINLLGFQQGDNLSLLYQAGDIFFFPSATETFGNVVLEALASGLPVIGAKAGGVKDLVKQAHNGILCPPGEVEAFLDALLFLMNNASVRQYYAKNARAFALKQSWDQIMKELLEELQDLVDNQAFFNQA

SEQ ID NO: 3539 - DNA, 351 bp, Alloiococcus otitidis
  CDS (19)..(348)
tactggcggacggaagcattgttcattaaaaataagagggcgtctaaaaaggcttccacctctccaggagggcagaggatgccattgtgggcttgcttgactaagtctttaactcctccagccttggccccgataaccggcaggccacttgctagggcttctaaaacaacattaccaaaggtttcagtggcagaagggaagaaaaagatatctcctgcctggtataagagggacaagttatccccttgctggaagccaagtaagttgatggggaggtcaaattctctggcctgccttttaatttcttgtcgcatgggaccgtcgcccacgatattgacttgcagcttgtag

SEQ ID NO: 3540 - protein, 110 aa, Alloiococcus otitidis
MFIKNKRASKKASTSPGGQRMPLWACLTKSLTPPALAPITGRPLARASKTTLPKVSVAEGKKKISPAWYKRDKLSPCWKPSKLMGRSNSLACLLISCRMGPSPTILTCSL

SEQ ID NO: 3541 - DNA, 624 bp, Alloiococcus otitidis
  CDS (82)..(621)
aagggacttttgaatgagaaggcctggtctagtaatcttagccttaccaaggccttggaatttaataaaggatgtgaagcaatggacgaaagagattttctcctgacctttcaatcaataatatggggtgttttagctagcttgcggatccactctactgctagccactatgatgactgctaccagctaggcttaatcaagctctttgcagcttatgaggactttcccggtgattttgaaagcgaggagggcctctaccagtttgggggctatgcctaccaaaaaataaaatgggcggttattgatgaatgccgtaaaatcaagcggtcggctgaccaagaaaccgacctccctatgcggtatgaagagttaaaccttttccagacggatgggatcgaagtaggttgtttggctcggcttgagatggcagacttcattcaaagtttaacggaccaggaaaggtgttacctggctctttacttggaatatgagaatgtgaccaaggtagcccaggcaatggggcggagccggaaaaccgtctaccaaatcaggaagcgtattgcaggcaagtatttggcttatgaccaagtcatgtcggacacaaacagggaggttaggaaatga

SEQ ID NO: 3542 - protein, 180 aa, Alloiococcus otitidis
MDERDFLLTFQSIIWGVLASLRIHSTASHYDDCYQLGLIKLFAAYEDFPGDFESEEGLYQFGGYAYQKIKWAVIDECRKIKRSADQETDLPMRYEELNLFQTDGIEVGCLARLEMADFIQSLTDQERCYLALYLEYENVTKVAQAMGRSRKTVYQIRKRIAGKYLAYDQVMSDTNREVRK

SEQ ID NO: 3543 - DNA, 624 bp, Alloiococcus otitidis; identical to SEQ ID NO: 3541
  CDS (10)..(621)

SEQ ID NO: 3544 - protein, 204 aa, Alloiococcus otitidis
MNEKAWSSNLSLTKALEFNKGCEAMDERDFLLTFQSIIWGVLASLRIHSTASHYDDCYQLGLIKLFAAYEDFPGDFESEEGLYQFGGYAYQKIKWAVIDECRKIKRSADQETDLPMRYEELNLFQTDGIEVGCLARLEMADFIQSLTDQERCYLALYLEYENVTKVAQAMGRSRKTVYQIRKRIAGKYLAYDQVMSDTNREVRK

SEQ ID NO: 3545 - DNA, 255 bp, Alloiococcus otitidis
  CDS (31)..(252)
ccgggaccaccaaaacggttatcattgagtatggttttatcgaccacaaactggatgccagtttttacgctcaggaagatcatttttaccgggtggctgaaggggtggtcaaggtggtttgcgcccaaattggtatttcttatcaaccagcaggaggtcggggagttttggctgagaaaggccaacaaggaccagccaggacttcttctgggcaagcgggaccgagttcaactaagtctagcctgtcaaggttag

SEQ ID NO: 3546 - protein, 74 aa, Alloiococcus otitidis
MVLSTTNWMPVFTLRKIIFTGWLKGWSRWFAPKLVFLINQQEVGEFWLRKANKDQPGLLLGKRDRVQLSLACQG

SEQ ID NO: 3547 - DNA, 255 bp, Alloiococcus otitidis; identical to SEQ ID NO: 3545
  CDS (25)..(252)

SEQ ID NO: 3548 - protein, 76 aa, Alloiococcus otitidis
MSMVLSTTNWMPVFTLRKIIFTGWLKGWSRWFAPKLVFLINQQEVGEFWLRKANKDQPGLLLGKRDRVQLSLACQG

SEQ ID NO: 3549 - DNA, 954 bp, Alloiococcus otitidis
  CDS (4)..(951)
gaaatgaaatccattatgattgaccccggccatggggggagcgattcaggtgcagtgggctttggtcgcttagaaaaggactggaccttagccatcagtttataccagtacaagcgtttggaggaactaggggcaagggttgccttgagccgggcaggagacgaaactttgccttcttatagccgggtagcccggattaaggaccaatatgactattgtatttccaaccactggaatgcctttaacggccaggccagaggggtggaaaccattcattcttaccgggccaatcctctttttgcccaaaagttagctgaccaaattgtcaaagatagtggcctacctttgcgccgggttttctcccgtaagaccgccaaccaaaagagtgactattactttatgcaccggctaaccgggaccaccaaaacggttatcattgagtatggttttatcgaccacaaactggatgccagtttttacgctcaggaagatcatttttaccgggtggctgaaggggtggtcaaggtggtttgcgcccaaattggtatttcttatcaaccagcaggaggtcggggagttttggctgagaaaggccaacaaggaccagccaggacttcttctgggcaagcgggaccgagttcaactaagtctagcctgtcaaggttaggtaagatttccacaaggcaagctgggccggaattaaagaagtctggtgcccaagctaaagaactagcaggcaagcgactgagaagtatccaccggggccggctccgcttttataataaggccagttggaagaaccaagatgtcttcggttacttaacttatggccaaggctttcctagggttttacaaaaagttcaagtcggcttggccagtcaataccaggtggaaaattccaagggccagcgtttttatgttactgccagtcctaagtatgttgagttgatctaa

SEQ ID NO: 3550 - protein, 316 aa, Alloiococcus otitidis
MKSIMIDPGHGGSDSGAVGFGRLEKDWTLAISLYQYKRLEELGARVALSRAGDETLPSYSRVARIKDQYDYCISNHWNAFNGQARGVETIHSYRANPLFAQKLADQIVKDSGLPLRRVFSRKTANQKSDYYFMHRLTGTTKTVIIEYGFIDHKLDASFYAQEDHFYRVAEGVVKVVCAQIGISYQPAGGRGVLAEKGQQGPARTSSGQAGPSSTKSSLSRLGKISTRQAGPELKKSGAQAKELAGKRLRSIHRGRLRFYNKASWKNQDVFGYLTYGQGFPRVLQKVQVGLASQYQVENSKGQRFYVTASPKYVELI

SEQ ID NO: 3551 - DNA, 852 bp, Alloiococcus otitidis
  CDS (10)..(849)
ggtggtttgatgattgagattgctttgaccggttggagcgaccacgacttgttgaccgaaacgcaaaagcaaaaattagaagactatgccaaacacttcccggctgtggagatggataccagtttttatgccatcccaccggagaaaaatatcctgtcctggatcgaaaaaacgcctgaccgctttcgttttttccccaaggcttacaaagctatgaccttgcacgctgattacaaggaagattttgactccttggaagacctctttaaaactttcaaggagacctttaaccctatgatagcccgggggaaaattcatagttttctcttccaattcccgcccaacttcgactgcagcaaggctaatgtcaactacctccgctttgtccgccaagagatgggccagttgccggttgccatcgaattccgccatccttcctggtttgaagaggggatggctgacaaaacgttggaattcttaactgaccaaaactttataaacgtggtagtggaccaaccacaaacatcgtctaatagtgtgccttttgttccccaagttaccaaccagcagtctgctatttaccgcctgcatgggaggaattatgaaggctggtcgggtgagtcagacgagtactggcgggatgtccggaccttgtggaactattctgaccaagagattgctgaaattggccaaactagtcagaaattagcccagcaagctgattccgttttagtggtttttaataacaattcagggggccatgccgccaagaatgccaagtccctgcaaaaatacctgggccttgaatttgatggtctgggccccatgcaaatggatttggacctgttttaa

SEQ ID NO: 3552 - protein, 280 aa, Alloiococcus otitidis
MIEIALTGWSDHDLLTETQKQKLEDYAKHFPAVEMDTSFYAIPPEKNILSWIEKTPDRFRFFPKAYKAMTLHADYKEDFDSLEDLFKTFKETFNPMIARGKIHSFLFQFPPNFDCSKANVNYLRFVRQEMGQLPVAIEFRHPSWFEEGMADKTLEFLTDQNFINVVVDQPQTSSNSVPFVPQVTNQQSAIYRLHGRNYEGWSGESDEYWRDVRTLWNYSDQEIAEIGQTSQKLAQQADSVLVVFNNNSGGHAAKNAKSLQKYLGLEFDGLGPMQMDLDLF

SEQ ID NO: 3553 - DNA, 852 bp, Alloiococcus otitidis; identical to SEQ ID NO: 3551
  CDS (7)..(849)

SEQ ID NO: 3554 - protein, 281 aa, Alloiococcus otitidis
MMIEIALTGWSDHDLLTETQKQKLEDYAKHFPAVEMDTSFYAIPPEKNILSWIEKTPDRFRFFPKAYKAMTLHADYKEDFDSLEDLFKTFKETFNPMIARGKIHSFLFQFPPNFDCSKANVNYLRFVRQEMGQLPVAIEFRHPSWFEEGMADKTLEFLTDQNFINVVVDQPQTSSNSVPFVPQVTNQQSAIYRLHGRNYEGWSGESDEYWRDVRTLWNYSDQEIAEIGQTSQKLAQQADSVLVVFNNNSGGHAAKNAKSLQKYLGLEFDGLGPMQMDLDLF

SEQ ID NO: 3555 - DNA, 402 bp, Alloiococcus otitidis
  CDS (46)..(399)
gaattccaacgttttgtcagccatcccctcttcaaaccaggaaggatggcggaattcgatggcaaccggcaactggcccatctcttggcggacaaagcggaggtagttgacattagccttgctgcagtcgaagttgggcgggaattggaagagaaaactatgaattttcccccgggctatcatagggttaaaggtctccttgaaagttttaaagaggtcttccaaggagtcaaaatcttccttgtaatcagcgtgcaaggtcatagctttgtaagccttggggaaaaaacgaaagcggtcaggcgttttttcgatccaggacaggatatttttctccggtgggatggcataaaaactggtatccatctccacagccgggaagtgtttggcatagtcttctaa

SEQ ID NO: 3556 - protein, 118 aa, Alloiococcus otitidis
MAEFDGNRQLAHLLADKAEVVDISLAAVEVGRELEEKTMNFPPGYHRVKGLLESFKEVFQGVKIFLVISVQGHSFVSLGEKTKAVRRFFDPGQDIFLRWDGIKTGIHLHSREVFGIVF

SEQ ID NO: 3557 - DNA, 270 bp, Alloiococcus otitidis
  CDS (19)..(267)
tcatcaccttggggtccaatggggttaaatttcacaacggccaggaagttatccatgtcccgtccatcgaaccctatcaagtcaaagacactaccggagctggtgacacctttaatggagccttggcagtcgctatggtccatgacctccccctcgaccaggctatccactttgctaacctggccgcttccttgtcaattgaaaaaatcggcgcccaaaccgggtccccaaatgtggcggaagtcaaagcaagaggtggcattgaaatag

SEQ ID NO: 3558 - protein, 83 aa, Alloiococcus otitidis
MGLNFTTARKLSMSRPSNPIKSKTLPELVTPLMEPWQSLWSMTSPSTRLSTLLTWPLPCQLKKSAPKPGPQMWRKSKQEVALK

SEQ ID NO: 3559 - DNA, 984 bp, Alloiococcus otitidis
  CDS (76)..(981)
aagacctggcgagaattgttaaggcttacactttcaaaaaagaacaggtacaatggggtaaaaggaggaaggattatgaaaaaaatcgtggtcgttggcagtatttcaaccgattttgtggcccagacatcccgttttcctgaagttggcgaaacggtagaaggacaggccttttcaactcacttcgggggcaagggggccaaccaagccgtggcagccgccaaactcttcccccatgtccagatgattggggcagtcggcgatgatccttttgccaaaaacttaatcgctaacttggagaaccatcaaattgacgctagacaggtgatccaagtttcccagcaagggtctggagcggccctcattgtcttggcaaagggggacaaccaaatcgtctatactcctggagctaataatgcggtcacagccgacctggtcgaccaggcaaaagaggacattttatccgctagcttggtcttggtccaaaatgaaatcccaaaagagtcagtccattacttgcttgacctgtgccaggacaagcaagtacccgttttgttgaacccagctccagcccgagacctttcggaagacgatattgacaagattgcttatttaacccctaacgaaaatgaatttgaccacatttttaagggtcaagaccaggctaaagttttagccaaataccccaacaagttgatcatcaccttggggtccaatggggttaaatttcacaacggccaggaagttatccatgtcccgtccatcgaaccctatcaagtcaaagacactaccggagctggtgacacctttaatggagccttggcagtcgctatggtccatgacctccccctcgaccaggctatccactttgctaacctggccgcttccttgtcaattgaaaaaatcggcgcccaaaccgggtccccaaatgtggcggaagtcaaagcaagaggtggcattgaaatagattggttggcaggctag

SEQ ID NO: 3560 - protein, 302 aa, Alloiococcus otitidis
MKKIVVVGSISTDFVAQTSRFPEVGETVEGQAFSTHFGGKGANQAVAAAKLFPHVQMIGAVGDDPFAKNLIANLENHQIDARQVIQVSQQGSGAALIVLAKGDNQIVYTPGANNAVTADLVDQAKEDILSASLVLVQNEIPKESVHYLLDLCQDKQVPVLLNPAPARDLSEDDIDKIAYLTPNENEFDHIFKGQDQAKVLAKYPNKLIITLGSNGVKFHNGQEVIHVPSIEPYQVKDTTGAGDTFNGALAVAMVHDLPLDQAIHFANLAASLSIEKIGAQTGSPNVAEVKARGGIEIDWLAG

SEQ ID NO: 3561 - DNA, 984 bp, Alloiococcus otitidis; identical to SEQ ID NO: 3559
  CDS (16)..(981)

SEQ ID NO: 3562 - protein, 322 aa, Alloiococcus otitidis
MLRLTLSKKNRYNGVKGGRIMKKIVVVGSISTDFVAQTSRFPEVGETVEGQAFSTHFGGKGANQAVAAAKLFPHVQMIGAVGDDPFAKNLIANLENHQIDARQVIQVSQQGSGAALIVLAKGDNQIVYTPGANNAVTADLVDQAKEDILSASLVLVQNEIPKESVHYLLDLCQDKQVPVLLNPAPARDLSEDDIDKIAYLTPNENEFDHIFKGQDQAKVLAKYPNKLIITLGSNGVKFHNGQEVIHVPSIEPYQVKDTTGAGDTFNGALAVAMVHDLPLDQAIHFANLAASLSIEKIGAQTGSPNVAEVKARGGIEIDWLAG

SEQ ID NO: 3563 - DNA, 996 bp, Alloiococcus otitidis
  CDS (10)..(993)
aatttggaaatgagaactattgccgaaaaactgatgatggacgggaagctaaactttattcgtcagcctagccaagaactccaggcagaagtggtgaaaactttgcgaacaaaggccttcacttcccatgcccagcgattggtcaagggctttgatggcgaaaggcaatttgatgagacctattcaacttacgcccaggactcctgggactacctaacggattttcattttgaattgggaaccttgacccagctagacgctattttaattacgcccggccatatccatgtttacgagattaaaaattatccggcatattgccaggtccaaaatgatattttttcctacaatggccaaccgcttgccagcaatcctttcaaccaggtaagggccattaagtctcggtttaacagcctgctgtctttgatcagctaccaaggccaggcatcttaccacctggtcatgattaataaggactgctattttaaggaccgggaccaatttagtgatgtcttgatgcgcaacgaactcaagcttcatttccaaagcctacagcgagctccttataaaaagaacccgccaaacttgctggaaaaaattaagcagtttgaaaccgacaacccttaccagaagaattatgcttttgattaccgagacctgcccccggggatcctgtgctacaagtgcgggtctttagatacttacccgtcctacaagcaaatcaagtgccgagactgtggtcatgcaagcagtaaaactaaggccttgcagaacttaatcggcgaactctctatcttggaccagaacaccccaattcggacccatgatatccatcagtatagtggtggggtgttgagtcggaaatatattacgaagaatactaaaaattatttaagtagaaaacagttgttcactcaatattatatcccgtcaaccaagttgtttaattttccacccttatataaaatatttcacaaaatatataacaatttataa

SEQ ID NO: 3564 - protein, 328 aa, Alloiococcus otitidis
MRTIAEKLMMDGKLNFIRQPSQELQAEVVKTLRTKAFTSHAQRLVKGFDGERQFDETYSTYAQDSWDYLTDFHFELGTLTQLDAILITPGHIHVYEIKNYPAYCQVQNDIFSYNGQPLASNPFNQVRAIKSRFNSLLSLISYQGQASYHLVMINKDCYFKDRDQFSDVLMRNELKLHFQSLQRAPYKKNPPNLLEKIKQFETDNPYQKNYAFDYRDLPPGILCYKCGSLDTYPSYKQIKCRDCGHASSKTKALQNLIGELSILDQNTPIRTHDIHQYSGGVLSRKYITKNTKNYLSRKQLFTQYYIPSTKLFNFPPLYKIFHKIYNNL

SEQ ID NO: 3565 - DNA, 996 bp, Alloiococcus otitidis; identical to SEQ ID NO: 3563
  CDS (4)..(993)

SEQ ID NO: 3566 - protein, 330 aa, Alloiococcus otitidis
MEMRTIAEKLMMDGKLNFIRQPSQELQAEVVKTLRTKAFTSHAQRLVKGFDGERQFDETYSTYAQDSWDYLTDFHFELGTLTQLDAILITPGHIHVYEIKNYPAYCQVQNDIFSYNGQPLASNPFNQVRAIKSRFNSLLSLISYQGQASYHLVMINKDCYFKDRDQFSDVLMRNELKLHFQSLQRAPYKKNPPNLLEKIKQFETDNPYQKNYAFDYRDLPPGILCYKCGSLDTYPSYKQIKCRDCGHASSKTKALQNLIGELSILDQNTPIRTHDIHQYSGGVLSRKYITKNTKNYLSRKQLFTQYYIPSTKLFNFPPLYKIFHKIYNNL

SEQ ID NO: 3567 - DNA, 720 bp, Alloiococcus otitidis
  CDS (13)..(717)
aaggaggatttgatgttagaaaaattgaaaaaccatatcaagtcagagtttgatcttgaattcaaagatgaaagcttattgttagaggcttttacccattcatcctatgcgaatgatcaccatcaggcccggcacaaaaacttggaacggttggagtttctaggtgatgcggtggtggaattatgtacctcggcttatttatatgataagtttccggaactacctgaaggccagttgacccggattcgggcagcttctgttcgggctgaaagtttggcccaactggctcgggagtgcgacctgcctcagtttatcctgctcggcaagggtgaggaaatgatgcagggtcgggagcgaccagcccttttgtgtgacgttttcgaagcttttacgggggctattttccaagaccagggttacgaacaggcccgccagttcttaagccaggtgcttttcccaaaaattgaccatgatgatttttctcatgggatggatttcaaaacggctctgcaagagttgatgcaggaaaacggcgaagtcaagattgattacgatgtggtggataccaaggggccggaccacaaccggactttttatgtggaagtgaaaattgaaggcgattcttatggggtcggccaagggaattctaagaaaagggcccagcagcaggctgctaaaaaagccttggagcagttgagccaaaagcaggctagtgactag

SEQ ID NO: 3568 - protein, 235 aa, Alloiococcus otitidis
MLEKLKNHIKSEFDLEFKDESLLLEAFTHSSYANDHHQARHKNLERLEFLGDAVVELCTSAYLYDKFPELPEGQLTRIRAASVRAESLAQLARECDLPQFILLGKGEEMMQGRERPALLCDVFEAFTGAIFQDQGYEQARQFLSQVLFPKIDHDDFSHGMDFKTALQELMQENGEVKIDYDVVDTKGPDHNRTFYVEVKIEGDSYGVGQGNSKKRAQQQAAKKALEQLSQKQASD

SEQ ID NO: 3569 - DNA, 720 bp, Alloiococcus otitidis; identical to SEQ ID NO: 3567
  CDS (10)..(717)

SEQ ID NO: 3570 - protein, 236 aa, Alloiococcus otitidis
MMLEKLKNHIKSEFDLEFKDESLLLEAFTHSSYANDHHQARHKNLERLEFLGDAVVELCTSAYLYDKFPELPEGQLTRIRAASVRAESLAQLARECDLPQFILLGKGEEMMQGRERPALLCDVFEAFTGAIFQDQGYEQARQFLSQVLFPKIDHDDFSHGMDFKTALQELMQENGEVKIDYDVVDTKGPDHNRTFYVEVKIEGDSYGVGQGNSKKRAQQQAAKKALEQLSQKQASD

SEQ ID NO: 3571 - DNA, 297 bp, Alloiococcus otitidis
  CDS (73)..(294)
ctttggacaactccactggcttcctccccattgactaccaggaagttagcattagcaggcgactcaaccgcaatggccagtctgactaccagattaaccagcaagactgccggctcaaagatattgtggacctctttttggactcgggcttgggtaaggaatctttttccattatttctcaaggcgaagtggagtctatttttaaggccaagccggaagatcggcgcgctatctttgaagaggcagcgggagtttttaaatacaaggttcaaaaaaaagaagctggacgtaagttag

SEQ ID NO: 3572 - protein, 74 aa, Alloiococcus otitidis
MASLTTRLTSKTAGSKILWTSFWTRAWVRNLFPLFLKAKWSLFLRPSRKIGALSLKRQREFLNTRFKKKKLDVS

SEQ ID NO: 3573 - DNA, 297 bp, Alloiococcus otitidis; identical to SEQ ID NO: 3571
  CDS (31)..(294)

SEQ ID NO: 3574 - protein, 88 aa, Alloiococcus otitidis
MTTRKLALAGDSTAMASLTTRLTSKTAGSKILWTSFWTRAWVRNLFPLFLKAKWSLFLRPSRKIGALSLKRQREFLNTRFKKKKLDVS

SEQ ID NO: 3575 - DNA, 3690 bp, Alloiococcus otitidis
  CDS (16)..(3687)
tgggtaagcttctctatgttagagggcttggtcaaggaaaaaaaccagtccattaccgaaaagttaaatccaagcaaagcaagtcattatcaagcaccatcaaaggggaagtatcgtttgcagttaaaaagactgaaaatcaaggggttcaagtcgtttgcggacccaactacaattgaatttgaccagggggtgacagctgttgtcggtcctaatgggtcaggcaagtccaatgttatcgaagccattcgctgggtgatgggagagcagtcggccaaaagccttcgtggtgggcggatggacgacattattttttcgggaactgaccaacgcaagcctatgaatattgcccaggtcaccctaactttggacaactccactggcttcctccccattgactaccaggaagttagcattagcaggcgactcaaccgcaatggccagtctgactaccagattaaccagcaagactgccggctcaaagatattgtggacctctttttggactcgggcttgggtaaggaatctttttccattatttctcaaggcgaagtggagtctatttttaaggccaagccggaagatcggcgcgctatctttgaagaggcagcgggagtttttaaatacaaggttcaaaaaaaagaagctggacgtaagttagaagatacccagggcaatcttgaccgggtggaagacatcttgcatgagttaaaaagccaggtcgatcctttgaaagaccaggctgaccaagctcagaaatacaaggacctccaggcccagctcaaaaaaactgatgtcggcttatcggtcatgcaaatcaaggcctatgccaaggacctggaccaggccaaaaaagaccagcagatcctcaagcaaaaaatccaaagtctcagtcagtcccttgaagaagaccgccagacccaagaccagttaaagggtgaccaagaccagctgagccagaaacgtgaccaggtttacaatgaaattgtcggtttaatccaagctattgaaggtaaagaaagtgacctggcccttcaagcagaaagggctaagcacaagcaagattatgtccaggaaaaaaccaaatcgattgaggccaaccaggctgacctggaggaagtcaagcggaagttggaagcaaaagaccaggaccgggtgcaagtagaagagtcaatcgaccagctgacccaggaccttaaggccaagcgagaccggttggcacttttacaagaagatagcgatgaccgcttggaagacttacgggccgactacatcgacctcatgcagtccaaggcctccctcaacaatgaagaccagtccttaaagcaagacttgaccaagtttggcatgcaaaatgcccgtcaggaaaagacccaagctgaccttcaggccaagttggaatcgagccaggctgacttaaacgaaaaagaaaaagagctagaccaggtcagtcaagaactaaatgatctactagaccgattccagcaaatcgactcagactgcaagcaattcaaggaccgctatcaaggagcagaagaccggctccgtcacttaaaacaggattatgaccgggccaaggctcaatacactagtttagcccagatgcaaaaatcctactccggctattacagtggggtcaaaaaagttatgcaaaaccaaggaaggcttcagggcattatcgggacagtggcagacttaattaccatccctaaccaatacctcacagccattgacaccagcctggggtcttccagccagtttatcgtggtggaagatgaggcatctggtcgggcagccattgactacctcaaacaaaacaaggctggccgggccaccttcttgcctctcaccaccattaaggggcggcaagtccaagccaagctcctgcaagaggcccaaacccagcccggctatattggcttggcatcggacctggtgacctatgaccagaagctgacccaaattgtccataacctactggggaccaccctcctggcccaggacttaaaatctgccaaccagattgccaaggccatccactaccgccaccgggtggttagtttggacgggaacatgatgaacgctggcgggtcgatgactgggggaggaaaccggtcccagcagtccccaatttttagccaaaaagaccaaatggaccacttgcaaggcaagctaaaatcccttcaacccaagattcacgaccaggaaaaacaactccaggacttgaaagctcaaaatgaccgcagtcaagatgacctagaagagatccggtcacaaggggaagccaagcgctaccgggaaaacaatttgaaaaatgcgattgcccacctgactgactccatcaagtccctccaagaccaggtcaaggccggtcaatttgaccaggaggaaagggaccgggaagcccaagaagccaaggaccgtttgcaagccattagtcaggagaaggagcaagttttagcccagttggaggccatcaaccaggaaatggaggacttaaacactgccaaggcagactccagcaagcaagaagaccaaatccttgctgaaatcgaccgtttgtctaacgacctaggacaaaaacgggaaaacctagcttccatcaaggccaacttagaagggctgaaagaccaagaagaccgcttcctaacagtgattgacgacctaaaagcagatatcaagtcctttcaggaagaagaagtctcccaagcctctagggaaagcttggcagcggaattgaaagacttaaaggccgaccaccaggctaaaaaagaccaggaagcccagctaaaagaaagggaggctgacctggcagaccaggttcaaaacttagctgaccaaatcaaggaccagcaagaccaaatccaggacttgacccaggccaagaataaaaatgaagttagccagtccagacttgaagttaacctggaccaccagctcaactacctggttgaagagtatggggtgagttttgaagaagctagccaaaaaccagacctagatatggatgctggccaagccaaagaccaggtcaagtccttgaaaactgccatcagcaacttaggcccggtcaacctcaacgctattgaagaataccagcaggtggcccagcgttatgacttccttgcccagcaacaagccgacctcatagaggccaaaagcgaactccaccagaccatgaaagagatggaccaggaagtgaaaagccggtttaaggccatgttcgaccaaattaaggaccgctttgcccaagtcttcccccagcttttcggtgggggccgggctgaactccgcttgacggacccggacgaccttttaaacaccggggtagacattatcgcccagcctccaggcaagagcctgtcctcccttagcctcctgtctggtggagagagggcattgacagctatttctctactttttgccattatccaggttagccctgtcccattttgtattttggacgaagcagaagctgccctggacgagtctaatgtgaaccgctttggtcgttacctccaggaatttgaaacggacacccaatttattgtgatcacccaccggcgggggaccatggaggaggcggaccgcttatatgggatcaccatgcaggaaaaaggagtttccaaactgatctctgtccgcctttctgatgtagaccaagatggtgactgggaagaagcaaggtag

SEQ ID NO: 3576 - protein, 1224 aa, Alloiococcus otitidis
MLEGLVKEKNQSITEKLNPSKASHYQAPSKGKYRLQLKRLKIKGFKSFADPTTIEFDQGVTAVVGPNGSGKSNVIEAIRWVMGEQSAKSLRGGRMDDIIFSGTDQRKPMNIAQVTLTLDNSTGFLPIDYQEVSISRRLNRNGQSDYQINQQDCRLKDIVDLFLDSGLGKESFSIISQGEVESIFKAKPEDRRAIFEEAAGVFKYKVQKKEAGRKLEDTQGNLDRVEDILHELKSQVDPLKDQADQAQKYKDLQAQLKKTDVGLSVMQIKAYAKDLDQAKKDQQILKQKIQSLSQSLEEDRQTQDQLKGDQDQLSQKRDQVYNEIVGLIQAIEGKESDLALQAERAKHKQDYVQEKTKSIEANQADLEEVKRKLEAKDQDRVQVEESIDQLTQDLKAKRDRLALLQEDSDDRLEDLRADYIDLMQSKASLNNEDQSLKQDLTKFGMQNARQEKTQADLQAKLESSQADLNEKEKELDQVSQELNDLLDRFQQIDSDCKQFKDRYQGAEDRLRHLKQDYDRAKAQYTSLAQMQKSYSGYYSGVKKVMQNQGRLQGIIGTVADLITIPNQYLTAIDTSLGSSSQFIVVEDEASGRAAIDYLKQNKAGRATFLPLTTIKGRQVQAKLLQEAQTQPGYIGLASDLVTYDQKLTQIVHNLLGTTLLAQDLKSANQIAKAIHYRHRVVSLDGNMMNAGGSMTGGGNRSQQSPIFSQKDQMDHLQGKLKSLQPKIHDQEKQLQDLKAQNDRSQDDLEEIRSQGEAKRYRENNLKNAIAHLTDSIKSLQDQVKAGQFDQEERDREAQEAKDRLQAISQEKEQVLAQLEAINQEMEDLNTAKADSSKQEDQILAEIDRLSNDLGQKRENLASIKANLEGLKDQEDRFLTVIDDLKADIKSFQEEEVSQASRESLAAELKDLKADHQAKKDQEAQLKEREADLADQVQNLADQIKDQQDQIQDLTQAKNKNEVSQSRLEVNLDHQLNYLVEEYGVSFEEASQKPDLDMDAGQAKDQVKSLKTAISNLGPVNLNAIEEYQQVAQRYDFLAQQQADLIEAKSELHQTMKEMDQEVKSRFKAMFDQIKDRFAQVFPQLFGGGRAELRLTDPDDLLNTGVDIIAQPPGKSLSSLSLLSGGERALTAISLLFAIIQVSPVPFCILDEAEAALDESNVNRFGRYLQEFETDTQFIVITHRRGTMEEADRLYGITMQEKGVSKLISVRLSDVDQDGDWEEAR

SEQ ID NO: 3577 - DNA, 987 bp, Alloiococcus otitidis
  CDS (169)..(984)
accaagatggtgactgggaagaagcaaggtagccggaagcgtcaagatagaaggaagagtcgagaaagctccaggagtcaagctatcaggaagattgagatagctgcaggatcaacccatctggaaaagtcaggatacttaaaatcaagattgctagaggaggcagccatgaaagtaaagccagatattcgcttaattgccatcgatttagacgggaccctcttagaccaggaccggaagatttcccaggaaaacaaggcggccattgccgcagctaaagaccagggagtcctaccggttttaacaactggccggccctatcctggtatggttggctacttagaagagtgccagttaatggaagagggggactactgtgtcacttataacggggccatggtccagaaaacagctagccaggaaattctcagaaaacatacctttactaaggaagaaatccagtccattgctgaccttttagctgacttggacctgccaatgagtgcgatcgggatggataccatctatgaaagcaagccgcctcaaggcaagcctagttcttaccgaaacatgcaacccctcctaccagtagtcgaaaatgttgcggttaaggacttagaagatatcgctaaaattgtcagtgctagaccccaggcagaaattgaacgggccttggctcagatacctcaagcctaccaggaccactttaccattgtcagaagccggcccaacctggttgagatcttagctaaaggagtggacaaggcgagtgggttgaatatgctggcccaggaactccagataaaacccagccagatgctggcgattggggacatgggcaatgatgctgctatgctaacctatgccggaattggggtggccatggggaatgcaccggaagccattcaaacgatcagtgactacgtgaccaagtctaaccaggaccacggggtagcccatgccatccaaaaatttgtgttaaaatga

SEQ ID NO: 3578 - protein, 272 aa, Alloiococcus otitidis
MKVKPDIRLIAIDLDGTLLDQDRKISQENKAAIAAAKDQGVLPVLTTGRPYPGMVGYLEECQLMEEGDYCVTYNGAMVQKTASQEILRKHTFTKEEIQSIADLLADLDLPMSAIGMDTIYESKPPQGKPSSYRNMQPLLPVVENVAVKDLEDIAKIVSARPQAEIERALAQIPQAYQDHFTIVRSRPNLVEILAKGVDKASGLNMLAQELQIKPSQMLAIGDMGNDAAMLTYAGIGVAMGNAPEAIQTISDYVTKSNQDHGVAHAIQKFVLK

SEQ ID NO: 3579 - DNA, 987 bp, Alloiococcus otitidis; identical to SEQ ID NO: 3577
  CDS (7)..(984)

SEQ ID NO: 3580 - protein, 326 aa, Alloiococcus otitidis
MVTGKKQGSRKRQDRRKSRESSRSQAIRKIEIAAGSTHLEKSGYLKSRLLEEAAMKVKPDIRLIAIDLDGTLLDQDRKISQENKAAIAAAKDQGVLPVLTTGRPYPGMVGYLEECQLMEEGDYCVTYNGAMVQKTASQEILRKHTFTKEEIQSIADLLADLDLPMSAIGMDTIYESKPPQGKPSSYRNMQPLLPVVENVAVKDLEDIAKIVSARPQAEIERALAQIPQAYQDHFTIVRSRPNLVEILAKGVDKASGLNMLAQELQIKPSQMLAIGDMGNDAAMLTYAGIGVAMGNAPEAIQTISDYVTKSNQDHGVAHAIQKFVLK

SEQ ID NO: 3581 - DNA, 291 bp, Alloiococcus otitidis
  CDS (25)..(288)
cttggacaagccttccgtgtatttttgagcttccagtcgggccacttcttccgggtcacggcgactaggctggctggcttctgggtctgcctgtccttggtcgggctgactgcttcggtcctgtctgtcacttgcctgggcttgaccctggtctggattgggcttgttagattgggcttggtcgctggtagtttgggcttggctcgtctgactctcctggccagcaccggtctggctagcttggtcgccggctgtttggtctctatcctggcttggcttagcttgacttga

SEQ ID NO: 3582 - protein, 88 aa, Alloiococcus otitidis
MSFQSGHFFRVTATRLAGFWVCLSLVGLTASVLSVTCLGLTLVWIGLVRLGLVAGSLGLARLTLLASTGLASLVAGCLVSILAWLSLT

SEQ ID NO: 3583 - DNA, 1506 bp, Alloiococcus otitidis
  CDS (19)..(1503)
ctggggaggagagatttcatgggattatttgataaaataaaaaaagtatttaccggagagtcaaaggaaaaagaccaggaaaagcagggtgaggaagctggtggacaggccagtcagacccaaaagacaaaccaaggtcaaaaagttagtgccagtccaagttcagaccaagggcaggcggaaactcttgatccagacctggacacttctaacctgcagccgagccaggaaaaacaccaggctgatatagcgggccagcctagtcaaaaacaagtcaaaaaagcaggtcaaggtcaagctgaccaaactcaatcaagtcaagctaagccaagccaggatagagaccaaacagccggcgaccaagctagccagaccggtgctggccaggagagtcagacgagccaagcccaaactaccagcgaccaagcccaatctaacaagcccaatccagaccagggtcaagcccaggcaagtgacagacaggaccgaagcagtcagcccgaccaaggacaggcagacccagaagccagccagcctagtcgccgtgacccggaagaagtggcccgactggaagctcaaaaatacacggaaggcttgtccaagtcacgccggtcctttaccagacggctgaacgagctttttgccaacttccgctatgaagacgaagaattctttgaagaattggaagacctcctgattgaatcagacgtgggctttgaagccaccatgtttatctcagaagttatgcgacatgaagccaaggtagagaacatccggaccatgaaggatgccgaacgggtcttggtcaaaaccatggtggacctttatggggataccaaccctgactatattgagtttaacgacaatcccgatggcctgaccgtgatcttgtttgtcggggtcaacggggtcggcaagaccacgaccattgccaagatggcccaccagtaccaagaacaaggcaaaaaagtgatcttagctgccggagacaccttccgggcaggggccattgaacagctccatgtctggggagaccggattggcgccccagtcgtctccacccaaaaaggaggcgacccggctgctgtcgtttacgatgggattgcccaggccaaagaccagggagcagacgtccttttaattgatacggcgggacggttgcaaaacaagaaaaacctgatgaacgaactagagaagatgaaacgggtcatctccaaagaaatcccggatgctccacatgaaaccctcctggtcctagacgctactaccggtcaaaatgccttgagccaggccaagatctttaaggaaaccactgatgtgacagggatcgtcttaaccaagatggacgggacagccaagggtgggattgtcctagccattgggaaagagttaggcattccggttaaatttgtcggtttaggggagaccatggacgacctccacgcctttgataccgaaaaattcgccatcggtctctttagagacttaattgagcagacggcttaa

SEQ ID NO: 3584 - protein, 495 aa, Alloiococcus otitidis
MGLFDKIKKVFTGESKEKDQEKQGEEAGGQASQTQKTNQGQKVSASPSSDQGQAETLDPDLDTSNLQPSQEKHQADIAGQPSQKQVKKAGQGQADQTQSSQAKPSQDRDQTAGDQASQTGAGQESQTSQAQTTSDQAQSNKPNPDQGQAQASDRQDRSSQPDQGQADPEASQPSRRDPEEVARLEAQKYTEGLSKSRRSFTRRLNELFANFRYEDEEFFEELEDLLIESDVGFEATMFISEVMRHEAKVENIRTMKDAERVLVKTMVDLYGDTNPDYIEFNDNPDGLTVILFVGVNGVGKTTTIAKMAHQYQEQGKKVILAAGDTFRAGAIEQLHVWGDRIGAPVVSTQKGGDPAAVVYDGIAQAKDQGADVLLIDTAGRLQNKKNLMNELEKMKRVISKEIPDAPHETLLVLDATTGQNALSQAKIFKETTDVTGIVLTKMDGTAKGGIVLAIGKELGIPVKFVGLGETMDDLHAFDTEKFAIGLFRDLIEQTA

SEQ ID NO: 3585 - DNA, 366 bp, Alloiococcus otitidis
  CDS (31)..(363)
agtgggtcaaacaaagcaaggaggttaagtatgcccatcgaagataggattgaaatcaacagcttgtttgacttctatggccccttactgaccgaaaaacagcaagactatctcaggctctactaccaacaagactattccctgggggagattgcggatgacttagcggtcagccggcaagctgtctatgataacattaaacggtcagagaaaatcttgaaagactatgagcagaccttacacctggtagctgacttccaagcaagagagcaagaacttgacaagctagccagctacgttaaagaacactacggacaggaccagcaattacaagaatttattgacaagatcagtttagagaggtga

SEQ ID NO: 3586 - protein, 111 aa, Alloiococcus otitidis
MPIEDRIEINSLFDFYGPLLTEKQQDYLRLYYQQDYSLGEIADDLAVSRQAVYDNIKRSEKILKDYEQTLHLVADFQAREQELDKLASYVKEHYGQDQQLQEFIDKISLER

SEQ ID NO: 3587 - DNA, 468 bp, Alloiococcus otitidis
  CDS (37)..(465)
ctgccttgctgtccggccatttcttctagttgggacatgtcgggcatttggctcccgcccatgccagggattttactggccatccgcttgagcatgccaccttttttgccaccggacccgcccatgagcttgtccagtcctttaggcattttacctttagacattttacccatgagttcacgagattgcttaaattgcttgatgagcttgtggacgtcggctagggggcgaccagagcctgctgcaatccgccgccgtctgttttgcgacagcatgtctgggttccgtctttcttccatggtcatagactggacaatggccttcattcggtccaagtccttgtcatccacctggaagtcatccaagcctggcaactggttcattcccggaatcattttaataatgtcttccatgggtcccatgttccgcatctggtccatctgctcgatgaagtcgttaaagtcatag

SEQ ID NO: 3588 - protein, 143 aa, Alloiococcus otitidis
MSGIWLPPMPGILLAIRLSMPPFLPPDPPMSLSSPLGILPLDILPMSSRDCLNCLMSLWTSARGRPEPAAIRRRLFCDSMSGFRLSSMVIDWTMAFIRSKSLSSTWKSSKPGNWFIPGIILIMSSMGPMFRIWSICSMKSLKS

SEQ ID NO: 3589 - DNA, 1500 bp, Alloiococcus otitidis
  CDS (1)..(1497)
atggcctttgaaggtttaagtggccgattacaagatgccttttccggcttaagaaaaaaaggaaaaattaccgaatcagacgtcaaagatgccatgcgggaggtccggttagccctactggaagccgacgttaactacaaggttgttcgggaattcgttaagaccgtccgcgaaaaagccattggggaagaagtactggataacgtagatggcggccaaatggttgttaaaattgtcaacgacgaattgaccgacctgatgggtggcgaccgccaagatatcataaccaatgatcaaggcattaccgtctacatgatgaccggtctccaaggggctgggaaaaccaccacagctgggaagttagccaactatctccgcaagcacaagaacatgaagcccatgatggtggccggggacgtttaccgaccggcggctattgaccaattggagactattgggaaagaattgaatatcccggtcttcagcatgggagaccaagtgtcacccgttgaaattgccgaacaagggatccaagcagccaaagaccaaaaccgtaatgtggttatcattgatacggctgggcgtttgcatgttgaccaggccttaatggatgaattggccaatatcaagtcggctgtcgacccagaagaaatcttcctggtagtggatgccatgactgggcaggatgccgtcaatgtggctgatgcctttaacgaccaactggatatctccagtgttatcctcaccaagctagacggggatacccggggtggggctgccctgtccatcagtaagattaccaacaagcctattaagtttaccggtaccggcgaaaaactagatgccctagaccccttctaccctgaccggatggccaaccgaatcttagggatgggggacatcctgaccctggtcgaaaaagcccagcaggatatggacgaaaaaagggcccgagaactggccgacaagatggctgatcaaacctatgactttaacgacttcatcgagcagatggaccagatgcggaacatgggacccatggaagacattattaaaatgattccgggaatgaaccagttgccaggcttggatgacttccaggtggatgacaaggacttggaccgaatgaaggccattgtccagtctatgaccatggaagaaagacggaacccagacatgctgtcgcaaaacagacggcggcggattgcagcaggctctggtcgccccctagccgacgtccacaagctcatcaagcaatttaagcaatctcgtgaactcatgggtaaaatgtctaaaggtaaaatgcctaaaggactggacaagctcatgggcgggtccggtggcaaaaaaggtggcatgctcaagcggatggccagtaaaatccctggcatgggcgggagccaaatgcccgacatgtcccaactagaagaaatggccggacagcaaggcagtcaaaaaccgaaacggaagaagaaaaagaaagtccggagaaaaagataa

SEQ ID NO: 3590 - protein, 499 aa, Alloiococcus otitidis
MAFEGLSGRLQDAFSGLRKKGKITESDVKDAMREVRLALLEADVNYKVVREFVKTVREKAIGEEVLDNVDGGQMVVKIVNDELTDLMGGDRQDIITNDQGITVYMMTGLQGAGKTTTAGKLANYLRKHKNMKPMMVAGDVYRPAAIDQLETIGKELNIPVFSMGDQVSPVEIAEQGIQAAKDQNRNVVIIDTAGRLHVDQALMDELANIKSAVDPEEIFLVVDAMTGQDAVNVADAFNDQLDISSVILTKLDGDTRGGAALSISKITNKPIKFTGTGEKLDALDPFYPDRMANRILGMGDILTLVEKAQQDMDEKRARELADKMADQTYDFNDFIEQMDQMRNMGPMEDIIKMIPGMNQLPGLDDFQVDDKDLDRMKAIVQSMTMEERRNPDMLSQNRRRRIAAGSGRPLADVHKLIKQFKQSRELMGKMSKGKMPKGLDKLMGGSGGKKGGMLKRMASKIPGMGGSQMPDMSQLEEMAGQQGSQKPKRKKKKKVRRKR

SEQ ID NO: 3591 - DNA, 312 bp, Alloiococcus otitidis
  CDS (91)..(309)
aagaaatggccggacagcaaggcagtcaaaaaccgaaacggaagaagaaaaagaaagtccggagaaaaagataatatagaagaaagacaattgctagctgaagaaattggcaattgtctttctattttcacaagtaaattagtagaatatgaactgattaagaggtttaaaattatgattgtttcaaaatcaaaaacaaacaaaataggccaaaatagtaccatgaatgtgattaaatacttttgttttatttttataaaatatactctattacttgatttgaccaaatcattgtattattatattaactag

SEQ ID NO: 3592 - protein, 73 aa, Alloiococcus otitidis
MLAEEIGNCLSIFTSKLVEYELIKRFKIMIVSKSKTNKIGQNSTMNVIKYFCFIFIKYTLLLDLTKSLYYYIN

SEQ ID NO: 3593 - DNA, 630 bp, Alloiococcus otitidis
  CDS (319)..(627)
cggcgaacgtctaagaagtcatttttaaggcgttccacttcttcgactgagtcagcgaagtcaatgtattctgccaattttggactggttgctccagctgcttgtaattcagctttggcggtttctttagcagcttctagatcagcttcttctgagtcttcagcttcatccggtgcttcagtttcatcaccttggtctggagtctcagtttcatcaggttgctcttctgctgcttggtcttgttctaattgttggcgacgaacgtcaagaaagtcatttttaaggcgttccacttcttctactgagtcagcgaagtcaatgtattctgctagtttgggactggttgctccagctgcttgtaattcagctttggcggtttctttagcagcttctaggtcagcttcttctgagtcttcagcttcatccgatgattcggtttcgtcaccttggtcgagtgcctcagtttcatcaggttgctcttctgctgaaacggcttggccattacctaagaataaggttgctccaactgcaacagaggcgacaccgacacttaattttttaagtgtcggtgttttttattggcagctttttcagcacgcgttttgtaattattttttcctaccatattaa

SEQ ID NO: 3594 - protein, 103 aa, Alloiococcus otitidis
MYSASLGLVAPAACNSALAVSLAASRSASSESSASSDDSVSSPWSSASVSSGCSSAETAWPLPKNKVAPTATEATPTLNFLSVGVFYWQLFQHAFCNYFFLPY

SEQ ID NO: 3595 - DNA, 630 bp, Alloiococcus otitidis; identical to SEQ ID NO: 3593
  CDS (64)..(627)

SEQ ID NO: 3596 - protein, 188 aa, Alloiococcus otitidis
MYSANFGLVAPAACNSALAVSLAASRSASSESSASSGASVSSPWSGVSVSSGCSSAAWSCSNCWRRTSRKSFLRRSTSSTESAKSMYSASLGLVAPAACNSALAVSLAASRSASSESSASSDDSVSSPWSSASVSSGCSSAETAWPLPKNKVAPTATEATPTLNFLSVGVFYWQLFQHAFCNYFFLPY

SEQ ID NO: 3597 - DNA, 4434 bp, Alloiococcus otitidis
  CDS (499)..(4431)
aaaacaccgacacttaaaaaattaagtgtcggtgtcgcctctgttgcagttggagcaaccttattcttaggtaatggccaagccgtttcagcagaagagcaacctgatgaaactgaggcactcgaccaaggtgacgaaaccgaatcatcggatgaagctgaagactcagaagaagctgacctagaagctgctaaagaaaccgccaaagctgaattacaagcagctggagcaaccagtcccaaactagcagaatacattgacttcgctgactcagtagaagaagtggaacgccttaaaaatgactttcttgacgttcgtcgccaacaattagaacaagaccaagcagcagaagagcaacctgatgaaactgagactccagaccaaggtgatgaaactgaagcaccggatgaagctgaagactcagaagaagctgatctagaagctgctaaagaaaccgccaaagctgaattacaagcagctggagcaaccagtccaaaattggcagaatacattgacttcgctgactcagtcgaagaagtggaacgccttaaaaatgacttcttagacgttcgccgtcaacaagttgaacaagaccaagaagttgaaggcgaagcgcccgaagatgaaggtcaaacgcctagtgaacctggtcaagaaaaaccagaggacggttcagaagatgaagaagctcaagctcttcaagccgcaaaagaatcagcaaaagctgaattgcaagcagctggagcaaccagtccaaaactagcggaatacattgactctgctgactcagtagaagaagtggaccgacttaaaaatgacttcttagaagttcgccgtcaacaagttgaacaaaatcaagctgcagacgaagacgtcgacaacggtagcgacgatactgaaaagcctggggaagatgacgaaggtgaaactgctgaagaagtagtttacaccctatactattatactcaaaacactaaagggaaaaacggtgccactaccgtaaaagctacaagtgtagaagaagcattggaatacttccaaaacttcgctagtgaaaatggcctaggtgacctagactggttttacaacgaagaaagcaagtctttcactgctagagaaaaagtagaagctgatgacgattctgacactgaagcacctgacgaatcagatactccaactgaccctgatgattcttcagaccaagatggagacgatgattcaacagatactgacgatccagatgatactgatgaagtagggagccaagaatctgtttacacattagtttacctaactccaaacactaatggtaaaaacggtgcaactactgtaaaagcatcaagtgctgaacaagctgaaaaatactttaaaaactttgtaaatgaaaatggcttaggtgaccttgaatggtcttacgatgaagacacaaaaaccttcactgcaatagaaaaatcaaatgacacgcctgatacagatgaagacctagttgaagaaaacaacgaaactggcttctcaactaaagaggcagcggaagcagcggcagaagaagctttagaaactgataaagttaacaactcatactctgtagcacaaggtgcggatggccgttggtactacgtattatcaccaaatctgccagaagaatccggtgacgatacacaagaacctgatgacgacgttgaagaaaacaacgaaactggcttctcaactaaagaggcagcggaagcagcggcagaagaagttttagaaactgataaagttaacaactcatactctgtagcacaaggtgcggatggccgttggtactacgtattatcaccaaatctgccagaagaatctgatgacaacgactcagaagagcaacgcttagcgatcctccaagcctcaaaagatgcattcaatgaatatcttaaaactagcgaagacgaagctgcgttgattaataatgctgagacagtcggagaagtcgttgacgcagccaacactatcattgatggccgcattgcagccaacgctcaggaagagcaagctcgtgcagctgcattccaagcaataaaagcggcactcaatgaaaaccttaatgctagcgaagacgaagctgcgttgatcaataatgctcagtcagtcggagaagtcgttgacgcagccaacactatcattgatggccgcattgcagccaacgctcaggaagagcaagctcgtgcagctgcattccaagcaataaaagcggcactcaatgaaaaccttaatgctagcgaagacgaagctgcgttgatcaataatgctcagtcagtcggagaagtcgttgacgcagccaacactatcattgatggccgcattgcagccaacgctcaggaagagcaagctcgtgcagctgcattccaagcaataaaagcggcactcaatgaaaaccttgatgctagcgaagacgaagctgcgttgatcaataatgctcagtcagtcggagaagtcgttgacgcagccaacactatcattgatggccgcattgcagccaacgctcaggaagaacaacgcttagcgatcctccaagcttcaaaagatgcattcaatgaatatcttaaaactagtgaagacgaagctgcgttagtaaacgaagctgactcactaaaagacattgttgacgcagccaacactatcattgacggccgcattgcagccaacgctcaggaagagcaagctcgtgcagctgcattccaagcaataaaagcggcactcaatgaaaaccttaatgctagcgaagacgaagctgcgttgatcaataatgctcagtcagtcggagaagtcgttgacgcagccaacactatcattgatggccgcattgcagccaacgctcaggaagaacaacgcttagcgatcctccaagcttcaaaagatgcattcaatgaatatcttaaaactagtgaagacgaagctgcgttagtaaacgaagctgactcactaaaagacattgttgacgcagccaacactatcattgacggccgcattgcagccaacgctcaggaagagcaagctcgtgcagctgcattccaagcaataaaagcggcactcaatgaaaaccttgatgctagcgaagacgaagctgcgttgatcaataatgctcagtcagtcggagaagtcgttgacgcagccaacactatcattgatggccgcattgcagccaacgctcaggaagaacaacgcttagcgatcctccaagcttcaaaagatgcattcaatgaatatcttaaaactagtgaagacgaagctgcgttagtaaacgaagctgactcactaaaagacattgttgacgcagccaacactatcattgacggccgcattgcagccaacgctcaggaagagcaagctcgtgcagctgatttccaagctaaaaaagagaccactattactgaattacaagaaattcttaacgatgtcctttccgatgaggaaaaatctctgattgttgatgcttacacagtggaagaagtagaagcggcgaaagacactattattgaaggccgagaagaagtctacacccttatatatactatagacggggaagaagactacagaaacactaaagccgttcaccctggtgaagctcgagaagcattccttgactttatccgccaagaaaacttagatgttgacgttatcgtctatgataaagacacaaaatccttccgagcatttggcggagaacaaccatactacttccattactcaaaagacggggagctctacattgatgggacaaaggctcagcacccaggtgaagccttagagatcatccgagattacattgaagagacagatcttgaagttaccaacctcttctacgatgaacgcacaaacacatttcatgctgtgctagaagataattctggtgttaaaacggatgaaacagtctacgagtccctacctgaagaattgagttgggatgaaatatcagatgaagctgatgaactagcagagcaatatctaccgctattcaaagcacaagatagtgcacttgaagcgttaaaatcattgggtatcacttctgaaagattgtttgacgaaattcgagaagcaacttcagttgaagaagttgaacagttagcgacaagcattctagaaactcgtaagcaacaacttttgcaaaacccagaagcggttaaagctttatcaatacaacgtttggaagctgacggtgctcttactgaaaaccaaagagcgttgctgactgacgctgaaacacatgaagaaattgcacaagcttcagaagtagtgacagtacaacgtgaggttatttcaaatctaaacgaaggattggctgaagacctatcttcagaagaggaagatcttattacaaacactagtactgtaaaagaagttcacacagcagctgagactattttaaatgctcgcgaacaaaaagcagctgaactctaa

SEQ ID NO: 3598 - protein, 1311 aa, Alloiococcus otitidis
MAEYIDFADSVEEVERLKNDFLDVRRQQVEQDQEVEGEAPEDEGQTPSEPGQEKPEDGSEDEEAQALQAAKESAKAELQAAGATSPKLAEYIDSADSVEEVDRLKNDFLEVRRQQVEQNQAADEDVDNGSDDTEKPGEDDEGETAEEVVYTLYYYTQNTKGKNGATTVKATSVEEALEYFQNFASENGLGDLDWFYNEESKSFTAREKVEADDDSDTEAPDESDTPTDPDDSSDQDGDDDSTDTDDPDDTDEVGSQESVYTLVYLTPNTNGKNGATTVKASSAEQAEKYFKNFVNENGLGDLEWSYDEDTKTFTAIEKSNDTPDTDEDLVEENNETGFSTKEAAEAAAEEALETDKVNNSYSVAQGADGRWYYVLSPNLPEESGDDTQEPDDDVEENNETGFSTKEAAEAAAEEVLETDKVNNSYSVAQGADGRWYYVLSPNLPEESDDNDSEEQRLAILQASKDAFNEYLKTSEDEAALINNAETVGEVVDAANTIIDGRIAANAQEEQARAAAFQAIKAALNENLNASEDEAALINNAQSVGEVVDAANTIIDGRIAANAQEEQARAAAFQAIKAALNENLNASEDEAALINNAQSVGEVVDAANTIIDGRIAANAQEEQARAAAFQAIKAALNENLDASEDEAALINNAQSVGEVVDAANTIIDGRIAANAQEEQRLAILQASKDAFNEYLKTSEDEAALVNEADSLKDIVDAANTIIDGRIAANAQEEQARAAAFQAIKAALNENLNASEDEAALINNAQSVGEVVDAANTIIDGRIAANAQEEQRLAILQASKDAFNEYLKTSEDEAALVNEADSLKDIVDAANTIIDGRIAANAQEEQARAAAFQAIKAALNENLDASEDEAALINNAQSVGEVVDAANTIIDGRIAANAQEEQRLAILQASKDAFNEYLKTSEDEAALVNEADSLKDIVDAANTIIDGRIAANAQEEQARAADFQAKKETTITELQEILNDVLSDEEKSLIVDAYTVEEVEAAKDTIIEGREEVYTLIYTIDGEEDYRNTKAVHPGEAREAFLDFIRQENLDVDVIVYDKDTKSFRAFGGEQPYYFHYSKDGELYIDGTKAQHPGEALEIIRDYIEETDLEVTNLFYDERTNTFHAVLEDNSGVKTDETVYESLPEELSWDEISDEADELAEQYLPLFKAQDSALEALKSLGITSERLFDEIREATSVEEVEQLATSILETRKQQLLQNPEAVKALSIQRLEADGALTENQRALLTDAETHEEIAQASEVVTVQREVISNLNEGLAEDLSSEEEDLITNTSTVKEVHTAAETILNAREQKAAEL

SEQ ID NO: 3599 - DNA, 4434 bp, Alloiococcus otitidis; identical to SEQ ID NO: 3597
  CDS (283)..(4431)

SEQ ID NO: 3600 - protein, 1383 aa, Alloiococcus otitidis
MERLKNDFLDVRRQQLEQDQAAEEQPDETETPDQGDETEAPDEAEDSEEADLEAAKETAKAELQAAGATSPKLAEYIDFADSVEEVERLKNDFLDVRRQQVEQDQEVEGEAPEDEGQTPSEPGQEKPEDGSEDEEAQALQAAKESAKAELQAAGATSPKLAEYIDSADSVEEVDRLKNDFLEVRRQQVEQNQAADEDVDNGSDDTEKPGEDDEGETAEEVVYTLYYYTQNTKGKNGATTVKATSVEEALEYFQNFASENGLGDLDWFYNEESKSFTAREKVEADDDSDTEAPDESDTPTDPDDSSDQDGDDDSTDTDDPDDTDEVGSQESVYTLVYLTPNTNGKNGATTVKASSAEQAEKYFKNFVNENGLGDLEWSYDEDTKTFTAIEKSNDTPDTDEDLVEENNETGFSTKEAAEAAAEEALETDKVNNSYSVAQGADGRWYYVLSPNLPEESGDDTQEPDDDVEENNETGFSTKEAAEAAAEEVLETDKVNNSYSVAQGADGRWYYVLSPNLPEESDDNDSEEQRLAILQASKDAFNEYLKTSEDEAALINNAETVGEVVDAANTIIDGRIAANAQEEQARAAAFQAIKAALNENLNASEDEAALINNAQSVGEVVDAANTIIDGRIAANAQEEQARAAAFQAIKAALNENLNASEDEAALINNAQSVGEVVDAANTIIDGRIAANAQEEQARAAAFQAIKAALNENLDASEDEAALINNAQSVGEVVDAANTIIDGRIAANAQEEQRLAILQASKDAFNEYLKTSEDEAALVNEADSLKDIVDAANTIIDGRIAANAQEEQARAAAFQAIKAALNENLNASEDEAALINNAQSVGEVVDAANTIIDGRIAANAQEEQRLAILQASKDAFNEYLKTSEDEAALVNEADSLKDIVDAANTIIDGRIAANAQEEQARAAAFQAIKAALNENLDASEDEAALINNAQSVGEVVDAANTIIDGRIAANAQEEQRLAILQASKDAFNEYLKTSEDEAALVNEADSLKDIVDAANTIIDGRIAANAQEEQARAADFQAKKETTITELQEILNDVLSDEEKSLIVDAYTVEEVEAAKDTIIEGREEVYTLIYTIDGEEDYRNTKAVHPGEAREAFLDFIRQENLDVDVIVYDKDTKSFRAFGGEQPYYFHYSKDGELYIDGTKAQHPGEALEIIRDYIEETDLEVTNLFYDERTNTFHAVLEDNSGVKTDETVYESLPEELSWDEISDEADELAEQYLPLFKAQDSALEALKSLGITSERLFDEIREATSVEEVEQLATSILETRKQQLLQNPEAVKALSIQRLEADGALTENQRALLTDAETHEEIAQASEVVTVQREVISNLNEGLAEDLSSEEEDLITNTSTVKEVHTAAETILNAREQKAAEL

SEQ ID NO: 3601 - DNA, 864 bp, Alloiococcus otitidis
  CDS (328)..(861)
tcaccacaacttaagaaaggagaaattcacttgcctcatcaacatgatattcgaaatttaattcagattcaagatgaaaacatttcttttcaggagcccatgaccgaagaaagggaagtcaaaggacaagcggccttgattcttcatgcctctttaacctacacaccacactgctgtgctaaatgtggcgtcgttaaccaaaactatacgatcatcaaaaatggcacgcaggaatccatgattaccctcccctttcaccccttcaaacccttttatttatgtctccgtaagcaacgcttttattgccgttcctgtgggaaaacatttatggcttcgacccatttggttaacttcaattgctttattgccaatccgctgaaagctggggtagcctttgaagcaagtcgggcggtttcatataaagatattgccgaacgtttaaatatttcttggtcgtccgttgcccgttttgcccgtctggcggcgaaagaaagacggaagggccccaaaagcctgcctgcccacctatcctttgatgaatttaaatataagaaggggaaaatggcctttgactatattgatgccgctaccggtcagatcttaggcattgtttccggtcggacccaatataaaatcaaccaacactttatcagccagtacagtctaaaggatcggcaacaggtccaaacggtcaccattgacatgaatgccggctatgtttcttgtattcgtgaactcttccctcaagccaaaatcattattgatcgcttccatttagttcaattgatcaatcggtcgtttaaccaaacccggattcaatacatgaaccaactccaatccaactcttcggatcaaaagaaatag

SEQ ID NO: 3602 - protein, 178 aa, Alloiococcus otitidis
MASTHLVNFNCFIANPLKAGVAFEASRAVSYKDIAERLNISWSSVARFARLAAKERRKGPKSLPAHLSFDEFKYKKGKMAFDYIDAATGQILGIVSGRTQYKINQHFISQYSLKDRQQVQTVTIDMNAGYVSCIRELFPQAKIIIDRFHLVQLINRSFNQTRIQYMNQLQSNSSDQKK

SEQ ID NO: 3603 - DNA, 864 bp, Alloiococcus otitidis; identical to SEQ ID NO: 3601
  CDS (100)..(861)

SEQ ID NO: 3604 - protein, 254 aa, Alloiococcus otitidis
MTEEREVKGQAALILHASLTYTPHCCAKCGVVNQNYTIIKNGTQESMITLPFHPFKPFYLCLRKQRFYCRSCGKTFMASTHLVNFNCFIANPLKAGVAFEASRAVSYKDIAERLNISWSSVARFARLAAKERRKGPKSLPAHLSFDEFKYKKGKMAFDYIDAATGQILGIVSGRTQYKINQHFISQYSLKDRQQVQTVTIDMNAGYVSCIRELFPQAKIIIDRFHLVQLINRSFNQTRIQYMNQLQSNSSDQKK

SEQ ID NO: 3605 - DNA, 864 bp, Alloiococcus otitidis; identical to SEQ ID NO: 3601
  CDS (31)..(861)

SEQ ID NO: 3606 - protein, 277 aa, Alloiococcus otitidis
MPHQHDIRNLIQIQDENISFQEPMTEEREVKGQAALILHASLTYTPHCCAKCGVVNQNYTIIKNGTQESMITLPFHPFKPFYLCLRKQRFYCRSCGKTFMASTHLVNFNCFIANPLKAGVAFEASRAVSYKDIAERLNISWSSVARFARLAAKERRKGPKSLPAHLSFDEFKYKKGKMAFDYIDAATGQILGIVSGRTQYKINQHFISQYSLKDRQQVQTVTIDMNAGYVSCIRELFPQAKIIIDRFHLVQLINRSFNQTRIQYMNQLQSNSSDQKK

SEQ ID NO: 3607 - DNA, 447 bp, Alloiococcus otitidis
  CDS (118)..(444)
aggcgacttaaagcgtattggaagctcttcttaaaaaaagaatctgacttatcctatacgtcctatcacttttaccgtctctttggtcaacgaaccgaagcgggtattcttcaggaaatgttggcctatgatccgtccttaaaacggcattaccggctttatcaagacttgatacaggccatccaagaccaagacatggccaagctagaagatcgattagccgtcaaccaagaaggcttatccaactacatgaaacgcagcctcaaaaccctggccaaacacctcccctttattgagaacaccttccactatccgtataccaacggtaaaattgaaggtacccataataaaatcaaagtcttaaaccgcattgcatatggcttccgaaatcttggcaattacctcgaccgaatttgcctttactttagctcccaacccattcaataa

SEQ ID NO: 3608 - protein, 109 aa, Alloiococcus otitidis
MLAYDPSLKRHYRLYQDLIQAIQDQDMAKLEDRLAVNQEGLSNYMKRSLKTLAKHLPFIENTFHYPYTNGKIEGTHNKIKVLNRIAYGFRNLGNYLDRICLYFSSQPIQ

SEQ ID NO: 3609 - DNA, 1200 bp, Alloiococcus otitidis
  CDS (34)..(1197)
aaaaccaaaaaacacattgaaaggaagatcattatgactcaactcaatcttacactagacgccaataaattaacagacgcaattttaaattgtgatctggatcaagtgatgaaatccaccttcgtgacggtcttaaatgcttatatggagtccgagcgcgaccaatatatgaaaagcaagcggtacgagcgagatgaagatcgctgtgattaccgcaatgggtatgacgagcgagatttcaccacgaaaatcggcaccctcaagctcaacgtgcccagaacgcgatcaggcgacttccatacccaattatttgaactcaatcagcggatggatcaaggcctattggctaccatctttgagatgtacgtcaatggcatctccacccgcaaaatgacgaaagtcgtcgaatccctttgtggtcaaaaggtctccaaatcgtttgtctccgatgtcaataaacacctggacaaggatgtctttaactttcaaaagcggtccctcacccatactaatttccggtatatctatgtcgatgccatgtatataaaggtccgagaggataaccgggtggtgtccaaagccctttacatcgcccaaggagtcaatgatgagaataggcgagaaatcatcgggtttaaagtggctgggcaagagtcaacggaaagttggcggtcgttcttcctcgatttaaaagccagaggcattgatacgccgaaaatggtgatttcagatgcccatgcaggcttacggaaagctattcaagaatgttttgtcaacaccacttggcaacgctgtacctttcacttattaagcaatatcaccgatgccttgccgaaaaccacggaccgagtcatccgagatcgtttccaagcggttttattttccagaacccagcaggaagctcgtgaacggaaacaagcattggaggcggaattcgaagaccaagcgaagctggctaaagccttgagcctattggatgagggctttgaagatgccattcagtatcagatcgagccttctccttaccacatgtctttaagaacaaccaattccattgaacgagtcaaccgtgaaattcgacgtcgagaaagagtggtggggattttccccaatatcaaatccgcggaacggctagccggctcggtcttattaaacctgcaggagaattgggaagctcagaactatcgatttttacgatag

SEQ ID NO: 3610 - protein, 388 aa, Alloiococcus otitidis
MTQLNLTLDANKLTDAILNCDLDQVMKSTFVTVLNAYMESERDQYMKSKRYERDEDRCDYRNGYDERDFTTKIGTLKLNVPRTRSGDFHTQLFELNQRMDQGLLATIFEMYVNGISTRKMTKVVESLCGQKVSKSFVSDVNKHLDKDVFNFQKRSLTHTNFRYIYVDAMYIKVREDNRVVSKALYIAQGVNDENRREIIGFKVAGQESTESWRSFFLDLKARGIDTPKMVISDAHAGLRKAIQECFVNTTWQRCTFHLLSNITDALPKTTDRVIRDRFQAVLFSRTQQEARERKQALEAEFEDQAKLAKALSLLDEGFEDAIQYQIEPSPYHMSLRTTNSIERVNREIRRRERVVGIFPNIKSAERLAGSVLLNLQENWEAQNYRFLR

SEQ ID NO: 3611 - DNA, 1578 bp, Alloiococcus otitidis
  CDS (37)..(1575)
atttgtttaagtatactaatacaaaggagttttagaatggtaggaaaaaataactataaaacacgtaccgaaaaagctgctaacaaaaagcaacgcttttcacttaaaaaattaagtgttggagttgcttctgttgcagtcggtactactctatttttgagtaatacagatgctgtttcagcagaagaaaatccggataggaatattgaacaattgcaagcagctctagagactgaaaaagaattcgcaattgccgaagtacaagcggcaggttttaccgatcaaaaatatgtagattggattaatgcacaggaaacagttcaagatgtcaatggtgtcaaacgtgaaatcctaacaactgttcctgacgaagaacaatcaggaattgaagaggaaacttcagttgactctgaatccgacttcaacgcaccagactttgactggagcggtaatgatgaagctgtagcggctgaggctgaacttcaagctgcaaaagaatcagccattgctgaagtaaaagcagcaggttttaccgatcaaaaatatgtagattggattaatgcacaagaaacagttcaagatgtcaatggagttaaacgtgaaatcctaacaactgttcctgacgaagaacaatcaggaatcgaaggcgaaacttctgtcgactcggaatacgacttcaacgaaccggaaattgactggagcggaaatgacgaagctgtagctgaagaagaagcagctcaagaagaagtttacactctaaactactacgctcaaagaacacaaggtcaaaatggtgcgacaaccgttaaagcatcaagcccaagagaagctttagaatacttccaagctttcttgaacgaaaatggtttagatgcagctgacttcaactggtcctatgacagtgaaagcagagcattcactgcaagtgaaaaaatcgaaggcgaagcttccgttgactctgaatacgacttcatccgaccagactttgattggagcggtctagaagaagcggaagacgatgaagaagttcaagaagaaatttacacctttgtttatatcattcaaaacaccaaaggcaaaaatggtgcgactactgtcaaagcatcaagcccagaagaagcaaaagcttacttcgaagaatttgccaaagaaaatgacttgggtgaattagactggacttacgatgaagacactaaaacattcaccgcaagagaaaaagtggaagaaagccaaacaatcgaaggggaaacttccgttgactcagtttacgacttcaaccgaccagaaattgattggagtggagctgaagaagtttatgaacgtgaactccaagcaacaaaagaagcagccattgctgaactccaaggtatctacattaaagacgaagaactcttcggtcgcattcaagatgcagaaagaatcgaagaagtcaaaaaattgagaagtgatgccatcgatgctcgccaagcattagttggtaaacttgatgaccaagaagcttccgcggattctgaatacgacttcgttcgaccagacgttgacttgactggtctagacgaaggctacgcacgtgaataa

SEQ ID NO: 3612 - protein, 513 aa, Alloiococcus otitidis
MVGKNNYKTRTEKAANKKQRFSLKKLSVGVASVAVGTTLFLSNTDAVSAEENPDRNIEQLQAALETEKEFAIAEVQAAGFTDQKYVDWINAQETVQDVNGVKREILTTVPDEEQSGIEEETSVDSESDFNAPDFDWSGNDEAVAAEAELQAAKESAIAEVKAAGFTDQKYVDWINAQETVQDVNGVKREILTTVPDEEQSGIEGETSVDSEYDFNEPEIDWSGNDEAVAEEEAAQEEVYTLNYYAQRTQGQNGATTVKASSPREALEYFQAFLNENGLDAADFNWSYDSESRAFTASEKIEGEASVDSEYDFIRPDFDWSGLEEAEDDEEVQEEIYTFVYIIQNTKGKNGATTVKASSPEEAKAYFEEFAKENDLGELDWTYDEDTKTFTAREKVEESQTIEGETSVDSVYDFNRPEIDWSGAEEVYERELQATKEAAIAELQGIYIKDEELFGRIQDAERIEEVKKLRSDAIDARQALVGKLDDQEASADSEYDFVRPDVDLTGLDEGYARE

SEQ ID NO: 3613 - DNA, 1299 bp, Alloiococcus otitidis
  CDS (397)..(1296)
gcagaagcagaagctttagaagcagcgaaagcagaagctattgaagaattaacagctgatggcgtgacatctgacctctggtttgaactgatcaacaaagccaacactgtagaaggtgtcgaaagcctcaagaatgacattcttaatgcacgtgaagatcaacgtgaacaagcagaagcagaagctttagaaacagcgaaagcagaagctattgaagaattaacagctgatggcgtgacatcagacctctggtttgaactgatcaacaaagccaacaccatagaaggtgttggaagtctcaaaaatgatattctaaatgctcgtgaaagacaacgtcaagaagcagttgctctagaagtgggaaaaacagcggctattgcagatctagaagatttattgggtacctcagtaactgaagatttaactgatgacgaaaaagctttgattaatgatgctaaaagccttgaggaagttaataaagttaaagctgaaatcattgataaccgatctgaagtgtacactttaaaattcatcaaagatggcgaaaaagattatagaaatactaaagccttgcacccaggggaagcaagagaagtcttcttaaactttattcaagaagaagatcttgttgtagttgtcttacattatgatgaagaaaccaatacctttactgctgttcctgatgggggagaattagaagtcagggaagaagaaggctacgatttcttaccagatggagttttagaatttgaagaaatccaagataaagcaaatgcacaactgcttcgggaagcacaagctttgcaacaagcgaaagaaaagtcctatgaacaattgaatgctgctggtataacttctaaaggattgtacgaaagaattgccaatgctaattcagtagaagaagttgaaccgttaacagaagtcttcttagaaagtcgtagacaacaactagctcaagaccttgctgtagcaaaagctcaagcaattgaagagttagatgctaacgaagctgaaagtgctcgaatcaacaatgctaattcagctgaagaattagctcaagtaattgaagaaattcaatctgaacgagctcttcaattggcaaaaggtgaagctattgtagaactagaagctgatggagaaacaagtgaagcggatagacagcgaatccaccaagctgactctattgaagaagttgagcgagtaaaagagtatattctatatgagagattatctttcttagagagaataaagtatggctttaatagacttggtgattggttcagaggaatttttcaataa

SEQ ID NO: 3614 - protein, 300 aa, Alloiococcus otitidis
MGTSVTEDLTDDEKALINDAKSLEEVNKVKAEIIDNRSEVYTLKFIKDGEKDYRNTKALHPGEAREVFLNFIQEEDLVVVVLHYDEETNTFTAVPDGGELEVREEEGYDFLPDGVLEFEEIQDKANAQLLREAQALQQAKEKSYEQLNAAGITSKGLYERIANANSVEEVEPLTEVFLESRRQQLAQDLAVAKAQAIEELDANEAESARINNANSAEELAQVIEEIQSERALQLAKGEAIVELEADGETSEADRQRIHQADSIEEVERVKEYILYERLSFLERIKYGFNRLGDWFRGIFQ

SEQ ID NO: 3615 - DNA, 1299 bp, Alloiococcus otitidis; identical to SEQ ID NO: 3613
  CDS (64)..(1296)

SEQ ID NO: 3616 - protein, 411 aa, Alloiococcus otitidis
MTSDLWFELINKANTVEGVESLKNDILNAREDQREQAEAEALETAKAEAIEELTADGVTSDLWFELINKANTIEGVGSLKNDILNARERQRQEAVALEVGKTAAIADLEDLLGTSVTEDLTDDEKALINDAKSLEEVNKVKAEIIDNRSEVYTLKFIKDGEKDYRNTKALHPGEAREVFLNFIQEEDLVVVVLHYDEETNTFTAVPDGGELEVREEEGYDFLPDGVLEFEEIQDKANAQLLREAQALQQAKEKSYEQLNAAGITSKGLYERIANANSVEEVEPLTEVFLESRRQQLAQDLAVAKAQAIEELDANEAESARINNANSAEELAQVIEEIQSERALQLAKGEAIVELEADGETSEADRQRIHQADSIEEVERVKEYILYERLSFLERIKYGFNRLGDWFRGIFQ

SEQ ID NO: 3617 - DNA, 297 bp, Alloiococcus otitidis
  CDS (4)..(294)
gcaatgcagaaggtgtttcagctgaagaaaatcctgatgctactacagctgacgatgcacaaggtcaatctacccgtgattctggttataactttaacgaaccagaattcgactggagcggagcagatcaagaatacgaacgtgaacaagaagaaaaagcccaagaactacaagcagcaaaagaagcagctattgctgaagttcaagcagctggcttcacagacgaaaaatatgctgattggatcaatgctcaggaaacagtgcaagatgtcaacgcagttaaacgtgaaatcttaa

SEQ ID NO: 3618 - protein, 97 aa, Alloiococcus otitidis
MQKVFQLKKILMLLQLTMHKVNLPVILVITLTNQNSTGAEQIKNTNVNKKKKPKNYKQQKKQLLLKFKQLASQTKNMLIGSMLRKQCKMSTQLNVKS

SEQ ID NO: 3619 - DNA, 2298 bp, Alloiococcus otitidis
  CDS (13)..(2295)
aggagttttagaatggtaggaaaaaacaactataagacacgtaccgaaaaagctgctaacaaaaagcaacgtttctcacttaaaaaattaagtgttggtgttgcatctgttgcagtcggtacaacattatttttaggcaatgcagaaggtgtttcagctgaagaaaatcctgatgctactacagctgacgatgcacaaggtcaatctacccgtgattctggttataactttaacgaaccagaattcgactggagcggagcagatcaagaatacgaacgtgaacaagaagaaaaagcccaagaactacaagcagcaaaagaagcagctattgctgaagttcaagcagctggcttcacagacgaaaaatatgctgattggatcaatgctcaggaaacagtgcaagatgtcaacgcagttaaacgtgaaatcttaacaactgttcctaacgaagaacaaagtggtattgaaggtgcaacttcagtagattctgaacatgacttcaacgcaccagaaattgactggagcggagcagatcaagcatatgaacgtgaacaagaagaaaaagcccaagaactacaagcagcaaaagaagcagctattgctgaagttcaagcagctggcttcacagacgaaaaatatgctgattggatcaatgctcaggaaacagtgcaagatgtcaatgcagttaaacgtgaaatattaacaactgttcctaacgaagaacaaagtggtattgaaggtgcaacttcagtagattctgaacatgacttcaacgcaccagaaattgactggagcgaagcagatcaagcatatgaacgtgaacaagaacaaaaagctcaagaactacaagcagcaaaagaagcagctattgctgaagttcaaacagctggcttcacagacgaaaaatatgctggttggatcaatgctcaggaaacagttcaagatgtcaacgcagttaaacgtgaaatcttaacaactgttcctaacgaagaacaaagtggtgttgaaggcgaaacttcagtagattctgaatatgacttcaacgcaccagaaattgactggagcggtctagaagaagcagttgctgaagaagaagcacaagaagaagtttacaccctttactattacggccaacgaactcaaaaccaaaacggtgtcactaccgttaaagcctcaagtccaagagaagcgctcgaatacttccaaaactacttgagtgaaaatggtttagatgctggagacttcaactggcactatgaaagtgatgaccgagtctttaccgctagcgaaaaaattgaaggcgaagcttctgttgactctgaatatgacttcaatgcaccagacattgactggagcggtctagaagatgcagtagctgaggaagaagctcaagaagaagtttacaccttttactactttggtcaacgcactcaaaaccaaaatggtgcgaccactgttaaagcatcaagcccaagagaagcactcgaatacttccaaaacttcttgagcgaaagaggtttagatgctggagacttcaactggcactatgaaagtgaagaccgagtctttaccgctagcgaaaaaattgaaggggaagcttccgttgattctgaatacgacttcgttcgaccagacttcgactggagtggcctagaagaagctattcaagacgaagaaaatcaagaagcagtctacaccttcgtttatatcactcaaaacaccaaaggcaaaaatggcgctactactgtcaaagcatcaagtcctgaagaagcactcgaatacttccaaaactgggcaaaagaaaatgaccttggcgaattagactggtcttatgatgaagatactaaaaccttcaccggaagagaaaaattagaagatgactctgatgatgattctggtgacactggtgaagaaaaacctggtcatggagattctgacacaggtgactctgactcagacgactctactgaagacgaaactgaggaagaaggtaaagaaggctcagatgaagcagatgacactacttctgatgactctaaagaccaaaaacctggtcaagttgcaccagttaaacttggtaaaggttctgaaggtcaagtagctactccagttcaagacagcaaacaagtttcaggtcaaaaagctcctgctggtcaagcacaagcttctaaccaggaagctgctgaagagtctggccaaactctaccagatacagctacttctgcttgggcactaggcctacttggtctatcaagtttagctggtggattgttcgctggtaaaaataaagaagactaa

SEQ ID NO: 3620 - protein, 761 aa, Alloiococcus otitidis
MVGKNNYKTRTEKAANKKQRFSLKKLSVGVASVAVGTTLFLGNAEGVSAEENPDATTADDAQGQSTRDSGYNFNEPEFDWSGADQEYEREQEEKAQELQAAKEAAIAEVQAAGFTDEKYADWINAQETVQDVNAVKREILTTVPNEEQSGIEGATSVDSEHDFNAPEIDWSGADQAYEREQEEKAQELQAAKEAAIAEVQAAGFTDEKYADWINAQETVQDVNAVKREILTTVPNEEQSGIEGATSVDSEHDFNAPEIDWSEADQAYEREQEQKAQELQAAKEAAIAEVQTAGFTDEKYAGWINAQETVQDVNAVKREILTTVPNEEQSGVEGETSVDSEYDFNAPEIDWSGLEEAVAEEEAQEEVYTLYYYGQRTQNQNGVTTVKASSPREALEYFQNYLSENGLDAGDFNWHYESDDRVFTASEKIEGEASVDSEYDFNAPDIDWSGLEDAVAEEEAQEEVYTFYYFGQRTQNQNGATTVKASSPREALEYFQNFLSERGLDAGDFNWHYESEDRVFTASEKIEGEASVDSEYDFVRPDFDWSGLEEAIQDEENQEAVYTFVYITQNTKGKNGATTVKASSPEEALEYFQNWAKENDLGELDWSYDEDTKTFTGREKLEDDSDDDSGDTGEEKPGHGDSDTGDSDSDDSTEDETEEEGKEGSDEADDTTSDDSKDQKPGQVAPVKLGKGSEGQVATPVQDSKQVSGQKAPAGQAQASNQEAAEESGQTLPDTATSAWALGLLGLSSLAGGLFAGKNKED

SEQ ID NO: 3621 - DNA, 699 bp, Alloiococcus otitidis
  CDS (334)..(696)
cagtgtctggtaaagtttgacctggtttctcttctttacccggtttttgttcagccggtttttcacccgatttttgctcacctggtttttgctcacttggtttttcgcctggtttttgctcacctggtttttcacctggtttttgctcacctggtttttcgcctggtttttgctcaccgggtttttcgcctggtttttcacccggtttttgctcgcctggtttttcgcctggtttttcgccgcctggttctacacctggtttttccccgcctggttcttcaccgtccgggtcttcaccgtctgggtcttctccatctgggtcttccccgcatagtgttcgccgtctgcgtcttcgccccggcttcttgcttcacctggttcttcgccatctggatcttcgactttttcgcgagcagtgaaagtcttactgtcttcgtcataagaccatttgaggtcacccaggtcgttttcgtttgcgaagtttttgaagtatgtttctgcttcttctgcacttttagctttaacagtggtggcaccgtttttgcctttggttcgttgtgcgaagtagtaaagggtgtaaacggcttcttcttcacctggctcttctggttcatttggttcgcctggttcttcgactttttcacgggcgatgaaggtcttagtttccggatcgtaactttcccattcgaggtcgcctag

SEQ ID NO: 3622 - protein, 121 aa, Alloiococcus otitidis
MFAVCVFAPASCFTWFFAIWIFDFFASSESLTVFVIRPFEVTQVVFVCEVFEVCFCFFCTFSFNSGGTVFAFGSLCEVVKGVNGFFFTWLFWFIWFAWFFDFFTGDEGLSFRIVTFPFEVA

SEQ ID NO: 3623 - DNA, 699 bp, Alloiococcus otitidis; identical to SEQ ID NO: 3621
  CDS (97)..(696)

SEQ ID NO: 3624 - protein, 200 aa, Alloiococcus otitidis
MVFRLVFAHLVFHLVFAHLVFRLVFAHRVFRLVFHPVFARLVFRLVFRRLVLHLVFPRLVLHRPGLHRLGLLHLGLPRIVFAVCVFAPASCFTWFFAIWIFDFFASSESLTVFVIRPFEVTQVVFVCEVFEVCFCFFCTFSFNSGGTVFAFGSLCEVVKGVNGFFFTWLFWFIWFAWFFDFFTGDEGLSFRIVTFPFEVA

SEQ ID NO: 3625 - DNA, 321 bp, Alloiococcus otitidis
  CDS (34)..(318)
agtttgacctggtttctcttctttacccggtttttgttcagccggtttttcacccgatttttgctcacctggtttttgctcacttggtttttcgcctggtttttgctcacctggtttttcacctggtttttgctcacctggtttttcgcctggtttttgctcaccgggtttttcgcctggtttttcacccggtttttgctcgcctggtttttcgcctggtttttcgccgcctggttctacacctggtttttccccgcctggttcttcaccgtccgggtcttcaccgtctgggtcttctccatctgggtcttccccgcatag

SEQ ID NO: 3626 - protein, 95 aa, Alloiococcus otitidis
MFSRFFTRFLLTWFLLTWFFAWFLLTWFFTWFLLTWFFAWFLLTGFFAWFFTRFLLAWFFAWFFAAWFYTWFFPAWFFTVRVFTVWVFSIWVFPA

SEQ ID NO: 3627 - DNA, 1512 bp, Alloiococcus otitidis
  CDS (991)..(1509)
tatggttggaaagaacattttaaaacgtatttcaaaaagacagccaataaaaagcagcgcttcacacttaagaaattgagtgttggccttgcatccgtagcagtaggtgctactttatttttaggcagtggtgaagcggtttcagctgaagaacctcctactgaagaaaatgaagatgttcctgctgaagatgttcctgctaatgaaaataaaaatgatggtcaaatagatgaaggtaaaacaccaggtgaagggacatctgctaacggtggcacaggtcaagtattgcctgatgcaaactctggccagaaaaacggtggagatcagcaaagtacaacacaaactgaacctaaaggactagcagaaaaccctgaaaatggttacttgactccagaaaatgctagtgcagcagcagaaaaagccttggaaacagatccagttaataaatccttcacagtaagccaaggggcaaacggtcgttacttctatcaattgacaccgaacccagcaccagacaatggtggggacgaagacaaagagccagaagaaaaccttgaaaatggctacttgactccagaaaatgctagtgcagcggcagaaaaagccttggaaacagatccagttaataaatccttcacagtaagccaaggggcaaacggtcgttacttctacctattgtcaccgaacccagcaccagacaatggtggggacgatgacgaagagccagaagaaaacaatcaaaatggctacttgactccagaaaatgctagtgcagcggcagaaaaagccttggaaacagatccagttaatgaatcctacacagtaagccaaggggcaaatggccgttactactacctactatcaccgaacccagcaccagacaatggtggggacgatgacgaagagcctggcgaaccggaagagccaggtgaagaagaagcagtttacaccctttactacttcgcacaacgaaccaaaggcaaaaacggtgtgactactgttaaagcacctaattccgatcgtgcagaagcatacttccgtaactgggtaaacgaaaatgacctaggcgacctcgaatgggaaagttacgatccggaaactaagaccttcatcgcccgtgaaaaagtcgaagaaccaggcgaaccaaatgaaccagaagagccaggtgaagaagaagccgtttacaccctttactacttcgcacaacgaaccaaaggcaaaaacggtgccaccactgttaaagctaaaagtgcagaagaagcagaaacatacttcaaaaacttcgcaaacgaaaacgacctgggtgacctcaaatggtcttatgacgaagacagtaagactttcactgctcgcgaaaaagtcgaagatccagatggcgaagaaccaggtgaagcaagaagccggggcgaagacgcagacggcgaacactatgcggggaagacccagatggagaagacccagacggtgaagacccggacggtgaagaaccaggcggggaaaaaccaggtgtag

SEQ ID NO: 3628 - protein, 173 aa, Alloiococcus otitidis
MTTVKAPNSDRAEAYFRNWVNENDLGDLEWESYDPETKTFIAREKVEEPGEPNEPEEPGEEEAVYTLYYFAQRTKGKNGATTVKAKSAEEAETYFKNFANENDLGDLKWSYDEDSKTFTAREKVEDPDGEEPGEARSRGEDADGEHYAGKTQMEKTQTVKTRTVKNQAGKNQV

SEQ ID NO: 3629 - DNA, 1512 bp, Alloiococcus otitidis; identical to SEQ ID NO: 3627
  CDS (76)..(1509)

SEQ ID NO: 3630 - protein, 478 aa, Alloiococcus otitidis
MSVGLASVAVGATLFLGSGEAVSAEEPPTEENEDVPAEDVPANENKNDGQIDEGKTPGEGTSANGGTGQVLPDANSGQKNGGDQQSTTQTEPKGLAENPENGYLTPENASAAAEKALETDPVNKSFTVSQGANGRYFYQLTPNPAPDNGGDEDKEPEENLENGYLTPENASAAAEKALETDPVNKSFTVSQGANGRYFYLLSPNPAPDNGGDDDEEPEENNQNGYLTPENASAAAEKALETDPVNESYTVSQGANGRYYYLLSPNPAPDNGGDDDEEPGEPEEPGEEEAVYTLYYFAQRTKGKNGVTTVKAPNSDRAEAYFRNWVNENDLGDLEWESYDPETKTFIAREKVEEPGEPNEPEEPGEEEAVYTLYYFAQRTKGKNGATTVKAKSAEEAETYFKNFANENDLGDLKWSYDEDSKTFTAREKVEDPDGEEPGEARSRGEDADGEHYAGKTQMEKTQTVKTRTVKNQAGKNQV

SEQ ID NO: 3631 - DNA, 285 bp, Alloiococcus otitidis
  CDS (49)..(282)
aaccaggcggcgaaaaaccaggcgaaaaaccaggcgagcaaaaaccgggtgaaaaaccaggcgaaaaacccggtgagcaaaaaccaggcgaaaaaccaggtgagcaaaaaccaggtgaaaaaccaggtgagcaaaaaccaggcgaaaaaccaagtgagcaaaaaccaggtgagcaaaaatcgggtgaaaaaccggctgaacaaaaaccgggtaaagaagagaaaccaggtcaaactttaccagacactgctacttctgcttgggcactcggactactcggtctaa

SEQ ID NO: 3632 - protein, 78 aa, Alloiococcus otitidis
MKNQAKNPVSKNQAKNQVSKNQVKNQVSKNQAKNQVSKNQVSKNRVKNRLNKNRVKKRNQVKLYQTLLLLLGHSDYSV

SEQ ID NO: 3633 - DNA, 990 bp, Alloiococcus otitidis
  CDS (133)..(987)
aaaggtgattttatgtccaagcctaactggtctaaatggtcccgtcttgtcctccttgtctttgccctctgttttcttccggcttgccaatatctacctgagcttctagattctaatccagaccaaaccagcatgacgctagagcctaatgaggagggtgacttcaaagcgcccagccaagttcctgaccaagcgggggaagatgtgctggtcatcaatgacaatattccttacttcagcgatcaggatatcactagccttgatccttaccacagcaatgaagacctggatgacttggaccgggttggggaggctaatgccttgattggaccggaatccttgcctagtgaagagagaggggagattggtcaatttgaacccactggctgggaccaggcccggtatgcgaatgttggggcgggtggctggctgtacaaccggtcccacttgattggctaccaactgactggtgttgatgactttgaaaatttaatgacagggacacgttggttcaatgaggccatggcggactttgagaactttgttgctttttatattgaggaagaagataaccatgtccgctaccgggtgacccctatctttgaagaggataatcgactggcctcaggtgcctatatggaagctttttccatcgaagataacggtcaaggggtcctgtttaatgtctatatacccaatatccaagaaggggttgctatcgattattctgatggctctagtcagggacctgctggaccgagccaagatggggacttgccagacttgaattcatcccaagatgaagctagggaagaccattcagaatcctgtccggtgaaaggcaatattaatagccaaggtgagaaaatttaccataccccggatggccgctactatgaccaggtcgatattgatccagaatcaggtgaagcgtgtttccaaaatgaagctgaagctcaagaggctggttggcgagccagtaagcagtaa

SEQ ID NO: 3634 - protein, 285 aa, Alloiococcus otitidis
MTLEPNEEGDFKAPSQVPDQAGEDVLVINDNIPYFSDQDITSLDPYHSNEDLDDLDRVGEANALIGPESLPSEERGEIGQFEPTGWDQARYANVGAGGWLYNRSHLIGYQLTGVDDFENLMTGTRWFNEAMADFENFVAFYIEEEDNHVRYRVTPIFEEDNRLASGAYMEAFSIEDNGQGVLFNVYIPNIQEGVAIDYSDGSSQGPAGPSQDGDLPDLNSSQDEAREDHSESCPVKGNINSQGEKIYHTPDGRYYDQVDIDPESGEACFQNEAEAQEAGWRASKQ

SEQ ID NO: 3635 - DNA, 990 bp, Alloiococcus otitidis; identical to SEQ ID NO: 3633
  CDS (13)..(987)

SEQ ID NO: 3636 - protein, 325 aa, Alloiococcus otitidis
MSKPNWSKWSRLVLLVFALCFLPACQYLPELLDSNPDQTSMTLEPNEEGDFKAPSQVPDQAGEDVLVINDNIPYFSDQDITSLDPYHSNEDLDDLDRVGEANALIGPESLPSEERGEIGQFEPTGWDQARYANVGAGGWLYNRSHLIGYQLTGVDDFENLMTGTRWFNEAMADFENFVAFYIEEEDNHVRYRVTPIFEEDNRLASGAYMEAFSIEDNGQGVLFNVYIPNIQEGVAIDYSDGSSQGPAGPSQDGDLPDLNSSQDEAREDHSESCPVKGNINSQGEKIYHTPDGRYYDQVDIDPESGEACFQNEAEAQEAGWRASKQ

SEQ ID NO: 3637 - DNA, 816 bp, Alloiococcus otitidis
  CDS (199)..(813)
ctgagctccataactcacaatgactatcttaacaggtcgctccagacttgtaaagtattttttctttacaggttaaattttttcgaaaataaaaaattatttaatttcagattacccctattgtgtccgaaagacttggtctgctataataaatcgcgtcgcaaaaatccgttaacactgacaagagaggagttagagatggcagaaaataaatgtaaagaaattaaatctaaattttttggaatcgaactggtgggacgtgatactttcaagccccaacccgcccttatggccaattaccagaatgacgaccagggcccaagcaagtggtctacagaggaaacccaaggaagcaatcatggcatggactctggcaaccagtctcaagatgacaaaaaccaggaggatgattcaaactggtacaactggaatgaaaatgcggaccgagatgtggttattaagattggtccactcagactctattaccccaactactactccttggtctccttatccctggatatctttgtagggatcttgtactttatcgggtccctcctcttcttatcggaaaaaaccatggcaatcggttcgatattatttgtcatcggtggcttcttcttctttatgagacctgttgttaaactcctagataacttccgccaatacaatcaggttgggttgaaacgggagaaagatgaccaagaattcgacgacaataaatttattgatgtgatctacagtgaggaagttccagaagaacaagaagaagagaatcaaattgatgactattacgctgaatactacgaaaactaa

SEQ ID NO: 3638 - protein, 205 aa, Alloiococcus otitidis
MAENKCKEIKSKFFGIELVGRDTFKPQPALMANYQNDDQGPSKWSTEETQGSNHGMDSGNQSQDDKNQEDDSNWYNWNENADRDVVIKIGPLRLYYPNYYSLVSLSLDIFVGILYFIGSLLFLSEKTMAIGSILFVIGGFFFFMRPVVKLLDNFRQYNQVGLKREKDDQEFDDNKFIDVIYSEEVPEEQEEENQIDDYYAEYYEN

SEQ ID NO: 3639 - DNA, 816 bp, Alloiococcus otitidis; identical to SEQ ID NO: 3637
  CDS (121)..(813)

SEQ ID NO: 3640 - protein, 231 aa, Alloiococcus otitidis
MCPKDLVCYNKSRRKNPLTLTREELEMAENKCKEIKSKFFGIELVGRDTFKPQPALMANYQNDDQGPSKWSTEETQGSNHGMDSGNQSQDDKNQEDDSNWYNWNENADRDVVIKIGPLRLYYPNYYSLVSLSLDIFVGILYFIGSLLFLSEKTMAIGSILFVIGGFFFFMRPVVKLLDNFRQYNQVGLKREKDDQEFDDNKFIDVIYSEEVPEEQEEENQIDDYYAEYYEN

SEQ ID NO: 3641 - DNA, 315 bp, Alloiococcus otitidis
  CDS (4)..(312)
gttatggagctcagtcaaaatactagacatggaggtgaaaaaatggcagttaaaatccgcatgaaacggatggggtctaaacgccgcccttactaccgtatcgttgtctcagattctcgtcgccacgtttcaaaagggtccattgaacaaattggaacttacaacccaatttcagaagaagaggacgtcaaaattgacgaagaattagccttgaaatggttacgcaacggtgctcaaccttctgattctgttcgcaaattattgtctgataaaggtgttatggagaaataccataacgaaaaatatggaaaataa

SEQ ID NO: 3642 - protein, 103 aa, Alloiococcus otitidis
MELSQNTRHGGEKMAVKIRMKRMGSKRRPYYRIVVSDSRRHVSKGSIEQIGTYNPISEEEDVKIDEELALKWLRNGAQPSDSVRKLLSDKGVMEKYHNEKYGK

SEQ ID NO: 3643 - DNA, 333 bp, Alloiococcus otitidis
  CDS (4)..(330)
aatatgactgatcaagaagtgaatgatttagaaacaaatggtcaagaaacaagtgaccaagaccgagatgaaggaactggtcaagtactaaccgaccaagaaatgagagaattaattcatacgatagtcaaacccttagtaagtcatccggaagatattgaactcaaccttcaagatactgaagacttccacgagtacttgttggaagttcacccagatgacgttggtcgcgttattggtaaacgtggccggattgccaaagcaattcgtgccattatctacagcatccaatacgaaggaccaaaacgtgtccgattaaccatcgttgactaa

SEQ ID NO: 3644 - protein, 109 aa, Alloiococcus otitidis
MTDQEVNDLETNGQETSDQDRDEGTGQVLTDQEMRELIHTIVKPLVSHPEDIELNLQDTEDFHEYLLEVHPDDVGRVIGKRGRIAKAIRAIIYSIQYEGPKRVRLTIVD

SEQ ID NO: 3645 - DNA, 537 bp, Alloiococcus otitidis
  CDS (13)..(534)
gaaggtgaaagtatgacggaatactaccgggtgggagatattgttaatacccatgggataaaaggggaggtccgggtccaatcggtcactagctacccggaagaacgctatcaaaaagggcaggtcctaacttggttaaaccaagcaggggaacaggccttggacttggtggttcaggcccaccgcctccataaaaacttccacttattgacttttgaaggttactccaatatcaatgaggtggaagcctttgttgggggaagcttgaacattgaggctagccaggtggatgattttgacttcgaccagggagtcttttaccagcatgatattgtgggtttgaaggtggtcgatgaaacaggccagccgcttggtcaagtgaaagagattattgaaaccccagccaatgatgtttgggtggtagaccgacctggccaaaaagacctcctcctaccctatattgattcggttatcttggatttggactttgaccgccaggaaatcaccgtacatattttagaggggttggatgattag

SEQ ID NO: 3646 - protein, 174 aa, Alloiococcus otitidis
MTEYYRVGDIVNTHGIKGEVRVQSVTSYPEERYQKGQVLTWLNQAGEQALDLVVQAHRLHKNFHLLTFEGYSNINEVEAFVGGSLNIEASQVDDFDFDQGVFYQHDIVGLKVVDETGQPLGQVKEIIETPANDVWVVDRPGQKDLLLPYIDSVILDLDFDRQEITVHILEGLDD

SEQ ID NO: 3647 - DNA, 732 bp, Alloiococcus otitidis
  CDS (34)..(729)
gtgaagattgatattttgacgctgttccctgaaatgcttgaagggcccttgagtcagtccatgatgaagcgagcccaagacaaggggttagtggatattcaggtgaccaactttcggcagtatggccaaggtaagcaccagcaagtcgacgacaccccttatgggggcggggccggcatgctgctcaagcccgagcccttgtttgaagccatggacgagatcaaaaaagaaggcggtggtagcccccgggttatcttgatggacccagccggccagccttttgaccaaaagatggcagaaaactttgcaaatgcttcccacttggtctttatttgtggccactatgagggctatgacgagcggatccggaccttggtcacggatgaagtgtcgctgggtgactatgttttaaccggaggggaattggcggccttagtcatgatcgacgccagtgtccgcctcctgcccggggttttaggcaaccaggcatcggcccaggctgattcccactcctccggtctgctggaacacccccactacacccggcccatcgagtaccggggcatgacggttccggaagtcttgcgcaacggcaaccacaaactgattgaccagtggcggcaccaggagtcattaaagcggacagccctccgccgacctgacatgctggctaaattggatttgagtgaagaggaccaggactaccttgaccagttaaggaaccaagaataa

SEQ ID NO: 3648 - protein, 232 aa, Alloiococcus otitidis
MLEGPLSQSMMKRAQDKGLVDIQVTNFRQYGQGKHQQVDDTPYGGGAGMLLKPEPLFEAMDEIKKEGGGSPRVILMDPAGQPFDQKMAENFANASHLVFICGHYEGYDERIRTLVTDEVSLGDYVLTGGELAALVMIDASVRLLPGVLGNQASAQADSHSSGLLEHPHYTRPIEYRGMTVPEVLRNGNHKLIDQWRHQESLKRTALRRPDMLAKLDLSEEDQDYLDQLRNQE

SEQ ID NO: 3649 - DNA, 732 bp, Alloiococcus otitidis; identical to SEQ ID NO: 3647
  CDS (16)..(729)

SEQ ID NO: 3650 - protein, 238 aa, Alloiococcus otitidis
MTLFPEMLEGPLSQSMMKRAQDKGLVDIQVTNFRQYGQGKHQQVDDTPYGGGAGMLLKPEPLFEAMDEIKKEGGGSPRVILMDPAGQPFDQKMAENFANASHLVFICGHYEGYDERIRTLVTDEVSLGDYVLTGGELAALVMIDASVRLLPGVLGNQASAQADSHSSGLLEHPHYTRPIEYRGMTVPEVLRNGNHKLIDQWRHQESLKRTALRRPDMLAKLDLSEEDQDYLDQLRNQE

SEQ ID NO: 3651 - DNA, 732 bp, Alloiococcus otitidis; identical to SEQ ID NO: 3647
  CDS (1)..(729)

SEQ ID NO: 3652 - protein, 243 aa, Alloiococcus otitidis
MKIDILTLFPEMLEGPLSQSMMKRAQDKGLVDIQVTNFRQYGQGKHQQVDDTPYGGGAGMLLKPEPLFEAMDEIKKEGGGSPRVILMDPAGQPFDQKMAENFANASHLVFICGHYEGYDERIRTLVTDEVSLGDYVLTGGELAALVMIDASVRLLPGVLGNQASAQADSHSSGLLEHPHYTRPIEYRGMTVPEVLRNGNHKLIDQWRHQESLKRTALRRPDMLAKLDLSEEDQDYLDQLRNQE

SEQ ID NO: 3653 - DNA, 831 bp, Alloiococcus otitidis
  CDS (46)..(828)
tatattccgaaaatcaaacgcatctcagttaggagtgatagttctatggcaaatgagtataatcttaagacagccgaccaaggaggaccagacgatttggaccggttggaaaaattgcaagaacttcatcaagaagctgagggcttacattaccgcattgaaaatacattgaccgatgaaattacaaagggtaagttagacctactcaaccagacgcttgatgaagttgataccgaaaaattcatccaacaagtggctgaccacagcaatgacgaaatggatgttttgcgtacggttaaaaacagtatcattaatatgaatacctacagtcgaattgcagctaaaaatggcggggtcctaccgctcaccttatatctgatatctgagcggtattccatcttaatcgaaaaagcccagaccatcgattacttgattgaccatgtcttctacaaactgcccagggagtatgcccaggccgtagcagactactccaccattggctattcagacatcattaaagacattgtctacgaaatctctaaagaattggcaagtaatttgactctcaaagaaattgctgaccgccacaagatgcaccctgtccacttggcccgtaagttcaaagctgaaaccggcatgacctttatcacttatatcaatgaacagcggattgccctggccatgtattacttccacttggacaagtataagctgggccaaattgtcaagttagctggctttaacagccattcctacttcaccaaggtcttcaaaaagtcgcaaggaattaccccaaccaagtacaagcgcttggtcttaaaagctgaatag

SEQ ID NO: 3654 - protein, 261 aa, Alloiococcus otitidis
MANEYNLKTADQGGPDDLDRLEKLQELHQEAEGLHYRIENTLTDEITKGKLDLLNQTLDEVDTEKFIQQVADHSNDEMDVLRTVKNSIINMNTYSRIAAKNGGVLPLTLYLISERYSILIEKAQTIDYLIDHVFYKLPREYAQAVADYSTIGYSDIIKDIVYEISKELASNLTLKEIADRHKMHPVHLARKFKAETGMTFITYINEQRIALAMYYFHLDKYKLGQIVKLAGFNSHSYFTKVFKKSQGITPTKYKRLVLKAE

SEQ ID NO: 3655 - DNA, 117 bp, Alloiococcus otitidis
  CDS (1)..(114)
gtggggggattgctacaaaaatgggcggaagtgacacttatcattaaaaatatgtctaaagatggacttattttaggaaaagtgaccctaatgattggttttttagttaatatttaa

SEQ ID NO: 3656 - protein, 38 aa, Alloiococcus otitidis
MGGLLQKWAEVTLIIKNMSKDGLILGKVTLMIGFLVNI

SEQ ID NO: 3657 - DNA, 882 bp, Alloiococcus otitidis
  CDS (37)..(879)
cttttgggcctattattacatttgtggaggaaattaatggaagagatgaatcattttgattataaacgttatttaaagcgctacctagactattatttcgatcaagccagcccagcccaaagccttgaccaaaggccttttacctataatttactggaccaaagcgaacaaacttttattgacatcgccttagaacaaaacagggtttgtttaaacgaccaggctctttacattaaggttgtcaccggtcatcaatcctaccaaagtcttatcttctacaccgatgggactattattaagagctgcgaatcgactgctgtcatcatgcaacggtttttccgccataagggcctaccctactcgacccattcccagttagggaagttgattaagatccaccaaaagtgcccttacatggtgaataaaatttgcctggcacctgagaagggcctttcaaaggattcagtaaattggataggcttacataacgtggtttatcatacaggtgataaggaccacaccctgctgaagacggccacttacaatgaattggtcatccccctaagccagaaaaaagttgataaaatggtccacaatagttctctccttgctcttattcaccaggctatcaggatttatacagcaggtcattatggctttttggaccattaccccaaccaggaaaatgtgattagccactacacccagaagctccgctaccagacccagctccccgacccaagggatatttatcagtacatggagcagcaaaaagtcattggggccctcaaacatattatggggatggactacccgaccagggaagaatgggacttaatggatcccaaactccaagccttcttcaatagcctagacccctaa

SEQ ID NO: 3658 - protein, 281 aa, Alloiococcus otitidis
MEEMNHFDYKRYLKRYLDYYFDQASPAQSLDQRPFTYNLLDQSEQTFIDIALEQNRVCLNDQALYIKVVTGHQSYQSLIFYTDGTIIKSCESTAVIMQRFFRHKGLPYSTHSQLGKLIKIHQKCPYMVNKICLAPEKGLSKDSVNWIGLHNVVYHTGDKDHTLLKTATYNELVIPLSQKKVDKMVHNSSLLALIHQAIRIYTAGHYGFLDHYPNQENVISHYTQKLRYQTQLPDPRDIYQYMEQQKVIGALKHIMGMDYPTREEWDLMDPKLQAFFNSLDP

SEQ ID NO: 3659 - DNA, 882 bp, Alloiococcus otitidis; identical to SEQ ID NO: 3657
  CDS (4)..(879)

SEQ ID NO: 3660 - protein, 292 aa, Alloiococcus otitidis
MGLLLHLWRKLMEEMNHFDYKRYLKRYLDYYFDQASPAQSLDQRPFTYNLLDQSEQTFIDIALEQNRVCLNDQALYIKVVTGHQSYQSLIFYTDGTIIKSCESTAVIMQRFFRHKGLPYSTHSQLGKLIKIHQKCPYMVNKICLAPEKGLSKDSVNWIGLHNVVYHTGDKDHTLLKTATYNELVIPLSQKKVDKMVHNSSLLALIHQAIRIYTAGHYGFLDHYPNQENVISHYTQKLRYQTQLPDPRDIYQYMEQQKVIGALKHIMGMDYPTREEWDLMDPKLQAFFNSLDP

SEQ ID NO: 3661 - DNA, 714 bp, Alloiococcus otitidis
  CDS (265)..(711)
agtgcaagtatttttgaatggtggtgcaagcaaatgacctatttccttgtctttatttatgccagtattttaggctctttttatgctgttttggctacagacccgaccctatcaggactggtgaggcggtccaagtgtgatgcttgtggccggaaattaaaggctttagacttaattcccatcctatcctatctagggttgaggggtcggtgtggggcttgccgatctaagataccccttgtttactttttagcagaaatgttcatgggacttttggcctgtctagccttttaccgccaggggtggtcaagagccttcctgtttgagttccttgtttattctttgctaattatcttatccctatccgatattttttatttacgggttccgaatgtcttacttctggtgtttgcccccgtattaatttacttttcacctttgacctggcaggggatggggctaggtttagtggtctctttcttcgtcctttttttaaccttttccttttctaagggaatggggatgggagatgtcaaacttttcttagtcttaggtctcgttttaggctaccaggctaacttgctcattatgggactggcttccttcttggctactggctacttcttaatgagccgtgagcaaaaactcccctttgtcccctttattttcatcgccactgtcttggcaagttttttgctaactgtcttttattaa

SEQ ID NO: 3662 - protein, 149 aa, Alloiococcus otitidis
MGLLACLAFYRQGWSRAFLFEFLVYSLLIILSLSDIFYLRVPNVLLLVFAPVLIYFSPLTWQGMGLGLVVSFFVLFLTFSFSKGMGMGDVKLFLVLGLVLGYQANLLIMGLASFLATGYFLMSREQKLPFVPFIFIATVLASFLLTVFY

SEQ ID NO: 3663 - DNA, 714 bp, Alloiococcus otitidis; identical to SEQ ID NO: 3661
  CDS (34)..(711)

SEQ ID NO: 3664 - protein, 226 aa, Alloiococcus otitidis
MTYFLVFIYASILGSFYAVLATDPTLSGLVRRSKCDACGRKLKALDLIPILSYLGLRGRCGACRSKIPLVYFLAEMFMGLLACLAFYRQGWSRAFLFEFLVYSLLIILSLSDIFYLRVPNVLLLVFAPVLIYFSPLTWQGMGLGLVVSFFVLFLTFSFSKGMGMGDVKLFLVLGLVLGYQANLLIMGLASFLATGYFLMSREQKLPFVPFIFIATVLASFLLTVFY

SEQ ID NO: 3665 - DNA, 1287 bp, Alloiococcus otitidis
  CDS (7)..(1284)
agaatcatgtcctacgccatgcaagttattgaccatattcaaaatgatgaattaaaagaagctcaagaaagtctagaccaagccctcaattttgaccaggctgatgacttgtacttgcttgctgactctttatttcaattgggtttcctagacgccaccaagcaagtcctggaccatcttttggacctggatcctggtgatgacgacctccggatttacctggccgagattgccatcgaagaaggggaggaccttgttgccattgactggttggaccaaattgcccccaacagtccggcctatgttcagtcgcttttagtggcggctgattattaccaaatccaggggttgcctgaggtggcagagtctaaacttcatgaagcccagtccttgatgccggatgagcccattatttcctttggcctggcagagttttactatacgaccggccagtacaaacgtgccatccaccattatgaagagaccatccagatgggggccagtcaagtggccggtattcaggtcaatgctcgcttggggacagcccatgcggcagcaggggacttcgaccaggctttagcctactttcaagaagccttagaagagaaagaagatcccgacaccctctttaacctgggcgtcacctattttcagctggaggaatacagtcgctgtgtcgaaaccatgcgccagctccactccctggaccacacctacacttccctctacccttatttagcccaggctttggaccaaacacaccagcatgaagaagcagcccaggctgttgcagaaggtttacgtttagacaagaccaatgcccaactttacctgatcggggccaacattcacattaagttggaccaactagaccaggcccaaacctatttccaggaggcttatgccttaaaccctaacagcgaaacgttgatcatcgagtatgctaattttttgaattacctgggccacttctctcaatcgatcgagatcttgcaaaaggccctggacgaaaatgatatagatccgcaattttactggctcctagcttcggcccaaaacgaagaggaaaactttgacttggcccggtcttattttgaccaagcctacccttactttaaagataacttggactttttaagggaatacctggccttcctccaagaagatgggcaagtggaccaagtcaaaagcatagcccaagactacttggcactggatccttcgaatattgaagtcagatccatgctggagcgattaaaggatgaagaagatttttttgaaggataa

SEQ ID NO: 3666 - protein, 426 aa, Alloiococcus otitidis
MSYAMQVIDHIQNDELKEAQESLDQALNFDQADDLYLLADSLFQLGFLDATKQVLDHLLDLDPGDDDLRIYLAEIAIEEGEDLVAIDWLDQIAPNSPAYVQSLLVAADYYQIQGLPEVAESKLHEAQSLMPDEPIISFGLAEFYYTTGQYKRAIHHYEETIQMGASQVAGIQVNARLGTAHAAAGDFDQALAYFQEALEEKEDPDTLFNLGVTYFQLEEYSRCVETMRQLHSLDHTYTSLYPYLAQALDQTHQHEEAAQAVAEGLRLDKTNAQLYLIGANIHIKLDQLDQAQTYFQEAYALNPNSETLIIEYANFLNYLGHFSQSIEILQKALDENDIDPQFYWLLASAQNEEENFDLARSYFDQAYPYFKDNLDFLREYLAFLQEDGQVDQVKSIAQDYLALDPSNIEVRSMLERLKDEEDFFEG

SEQ ID NO: 3667 - DNA, 576 bp, Alloiococcus otitidis
  CDS (10)..(573)
ggtgatcttatgccgaaccgtatcaaattagaagataagaaagcttttattaaatggtttacggagacccagcaggttagaagacgggagtccctttggattttaaactatctcttaaaccacgatattgttctcaacaagagccattttgtcgactacgctcatgccaccccacggggtatccggattgcggcggcaaacacccagggcagaagtttccttttttacaagggtggcattgaatacgaagaccctgagaaagccttccatgaaatccggatgaactggcacgaacccttgtatattgaagttgactttgtgggcaaaaatattagcccggcctatgtcaaggtcttggaagataacccttatgctcgttggaatgaccgagttccggctgacctggttgttcaagtggaggacgccttggataacttccagctcaatgtgcgcaaggaggaaatccaccaggccatcgaccaggccttgcaggaagatgacaaggagaccttctacaagctaagccaggaattaattgatattaacaattacttgaatgaagagaacaagacctaa

SEQ ID NO: 3668 - protein, 188 aa, Alloiococcus otitidis
MPNRIKLEDKKAFIKWFTETQQVRRRESLWILNYLLNHDIVLNKSHFVDYAHATPRGIRIAAANTQGRSFLFYKGGIEYEDPEKAFHEIRMNWHEPLYIEVDFVGKNISPAYVKVLEDNPYARWNDRVPADLVVQVEDALDNFQLNVRKEEIHQAIDQALQEDDKETFYKLSQELIDINNYLNEENKT

SEQ ID NO: 3669 - DNA, 327 bp, Alloiococcus otitidis
  CDS (1)..(324)
atgacggatatggcagacatgcaaaaacaggtagacgagtttattggccaatttgaagtaggctacttttcccccttagccatgatggcccggctgacggaagaaaccggcgaattagctcgagagattaaccattaccatggggaaaagcagaagaaggctagtgaagaccccaagtctttgcaagaagagttgggggacgtcctctttgtggtgatttccatggccaatgccttggagattgatttagaccaggccttccaacaagtcatggctaaatttcaagaccgggacaaggaccggttcaagcgcaaatcagaccagtaa

SEQ ID NO: 3670 - protein, 108 aa, Alloiococcus otitidis
MTDMADMQKQVDEFIGQFEVGYFSPLAMMARLTEETGELAREINHYHGEKQKKASEDPKSLQEELGDVLFVVISMANALEIDLDQAFQQVMAKFQDRDKDRFKRKSDQ

SEQ ID NO: 3671 - DNA, 1323 bp, Alloiococcus otitidis
  CDS (304)..(1320)
aggaatgatgacgtgggaaagtcatttgaagataaagaaaaacaaaaaccaggtaagggtcaagacctagcccgagaaggccgggtcgacctaaaccgcctcccagaattcaagcaggctcttccggtcttagataccctcattgaaggaggctatgaggcttattttgtcggagggagtgttcgtgatgccttgcttggcctagacttgaatgatgtggacattgcaacctcggcccaacctgaagaagtcaaggccttgtttaaaaagacggttgatgtggggatagaccacgggactgtcatggtcctccaaggagggacctcttatgaaatcacaacatttcggaccgaatccacctaccaagaccaccgcagacccgattcggttcattttgtgcgttctttagaagaagatttgaagcggcgagacttcactattaatgccctagccttagaccgaaatggggcggtgaccgacttatttgacggcattcaagacttggaggatggccttatccgggcagtgggccaggcagaagagcgctttaatgaagatgccttgcggatgatgcgggcagttcgctttgctggccagctcggttttgaaatcgcccaggacaccaaggcggccattaaaaaacaccgccagcttttagaagagattgccgtggaacggatccaagtcgagtgggttaaattattgacaggtcaggaccgccagaagggggtaaaggccatgattgagaccaagctctatgactactgccccctcttaagcaataaaaaagcggccttgacctacttggtagccaacccccattcgcttgactctgaccgccaggcctgggccttgctcttgtattacgtccgctatatccagcccaagggttaccaggaagacattaatacttttcttagaacttggaagacttccaaggccatggtggaccaaacggaaatcttggttgaaggcttggaagaccggaaaaatggcaagtcactggatccttatgccatctaccagcagggacttgacttgagtttagatattgaaactttgctggaagtcttaggccaagaaggtaagcaagccgaagtgaaggagacctaccaaaagctagccatccactcctccagtgacttagacctaaccggctatgacctgatggaagcttatggtcgcaagccagggccttggttgggatcagccctcaaccaggccgaaaaagctgttgtccgaggcgattggcccaatgataaaaaccaattactccagcatttaaaagactatgcaatagaagacgaaaagcaagatgattag

SEQ ID NO: 3672 - protein, 339 aa, Alloiococcus otitidis
MVLQGGTSYEITTFRTESTYQDHRRPDSVHFVRSLEEDLKRRDFTINALALDRNGAVTDLFDGIQDLEDGLIRAVGQAEERFNEDALRMMRAVRFAGQLGFEIAQDTKAAIKKHRQLLEEIAVERIQVEWVKLLTGQDRQKGVKAMIETKLYDYCPLLSNKKAALTYLVANPHSLDSDRQAWALLLYYVRYIQPKGYQEDINTFLRTWKTSKAMVDQTEILVEGLEDRKNGKSLDPYAIYQQGLDLSLDIETLLEVLGQEGKQAEVKETYQKLAIHSSSDLDLTGYDLMEAYGRKPGPWLGSALNQAEKAVVRGDWPNDKNQLLQHLKDYAIEDEKQDD

SEQ ID NO: 3673 - DNA, 1323 bp, Alloiococcus otitidis; identical to SEQ ID NO: 3671
  CDS (193)..(1320)

SEQ ID NO: 3674 - protein, 376 aa, Alloiococcus otitidis
MLGLDLNDVDIATSAQPEEVKALFKKTVDVGIDHGTVMVLQGGTSYEITTFRTESTYQDHRRPDSVHFVRSLEEDLKRRDFTINALALDRNGAVTDLFDGIQDLEDGLIRAVGQAEERFNEDALRMMRAVRFAGQLGFEIAQDTKAAIKKHRQLLEEIAVERIQVEWVKLLTGQDRQKGVKAMIETKLYDYCPLLSNKKAALTYLVANPHSLDSDRQAWALLLYYVRYIQPKGYQEDINTFLRTWKTSKAMVDQTEILVEGLEDRKNGKSLDPYAIYQQGLDLSLDIETLLEVLGQEGKQAEVKETYQKLAIHSSSDLDLTGYDLMEAYGRKPGPWLGSALNQAEKAVVRGDWPNDKNQLLQHLKDYAIEDEKQDD

SEQ ID NO: 3675 - DNA, 1323 bp, Alloiococcus otitidis; identical to SEQ ID NO: 3671
  CDS (13)..(1320)

SEQ ID NO: 3676 - protein, 436 aa, Alloiococcus otitidis
MGKSFEDKEKQKPGKGQDLAREGRVDLNRLPEFKQALPVLDTLIEGGYEAYFVGGSVRDALLGLDLNDVDIATSAQPEEVKALFKKTVDVGIDHGTVMVLQGGTSYEITTFRTESTYQDHRRPDSVHFVRSLEEDLKRRDFTINALALDRNGAVTDLFDGIQDLEDGLIRAVGQAEERFNEDALRMMRAVRFAGQLGFEIAQDTKAAIKKHRQLLEEIAVERIQVEWVKLLTGQDRQKGVKAMIETKLYDYCPLLSNKKAALTYLVANPHSLDSDRQAWALLLYYVRYIQPKGYQEDINTFLRTWKTSKAMVDQTEILVEGLEDRKNGKSLDPYAIYQQGLDLSLDIETLLEVLGQEGKQAEVKETYQKLAIHSSSDLDLTGYDLMEAYGRKPGPWLGSALNQAEKAVVRGDWPNDKNQLLQHLKDYAIEDEKQDD

SEQ ID NO: 3677 - DNA, 276 bp, Alloiococcus otitidis
  CDS (16)..(273)
gcctgcttggtcttgatgacagcccggggcaacaggtcatctttaaagatattcatcccctcttctttcatcctttggtgttcatctttcaccagaggcatgtcaggggaatcaaagggaagccgggtcaggacaacaacttccaggaactcgccaggtaggtcaatcccttcaaaaaaggtatccgacccaaacagaatgctcttcttagcccgtttgaattgtttgagaattttataccgtgacccggacaggtcttgggctaagagggcataa

SEQ ID NO: 3678 - protein, 86 aa, Alloiococcus otitidis
MTARGNRSSLKIFIPSSFILWCSSFTRGMSGESKGSRVRTTTSRNSPGRSIPSKKVSDPNRMLFLARLNCLRILYRDPDRSWAKRA

SEQ ID NO: 3679 - DNA, 276 bp, Alloiococcus otitidis; identical to SEQ ID NO: 3677
  CDS (7)..(273)

SEQ ID NO: 3680 - protein, 89 aa, Alloiococcus otitidis
MVLMTARGNRSSLKIFIPSSFILWCSSFTRGMSGESKGSRVRTTTSRNSPGRSIPSKKVSDPNRMLFLARLNCLRILYRDPDRSWAKRA

SEQ ID NO: 3681 - DNA, 2802 bp, Alloiococcus otitidis
  CDS (19)..(2799)
ttaggaaggaggggagagatggaagaccccaatttatatgccatagtggatatcgaagccaccgctggtagtttagggactgatgagcggatgattcagtttgcctgtattttgctggaagacggccaggtggttgaagagtttgataccctggtcaaccctttgcgaccggttcccattcgaatccaaaaactgacgggaatttctcaaaaggaggtcaaccaagcccctcactttgatgagattgcccatatcatccatgacctcttagaggatgcggtctttgtcgcccataatgtcaattttgactaccggtttttaaatgaacgatttgaagcggtgggtctagaaccccttcaaaccaaggccatcgacacggtcgccttgtcccggatttgcttcccccaggcggaccactataatttgaccgatttgaccacttggctgggctatgacattgaacaggcccacgatgccctctatgatgcccgggccactgccttcctgctggataaaattataggcaagctagccggcctacctccccttaccctcaagcaggtctcagacttaagccagggtttggcccaggatacccagtggttgattgaccaggcatataaccaggtgaaagaccagtcgcctgacttggaaaatggcttggttttttatgaaggcttggccatcaaagaccccaaaaaatcctttgatatccgcctctcccggtcgctcaaggattacccactgacagatagggacaaggctaagttttttgccaagtcctttcgtctgcggcagcgacaaggggacttgatggaccaaatttattattattttaacaaagacaaggaaaatgaggagctagccattgaagcaccagctgggatcggcaagtctttggcctacctggtacccagtgtttttgtgggcaagcccgtagtgatttcgacccataccaggaccttgcaggaccaacttctagaagaagccctgccctttatggagcaagtcagtcccttaaaaccaaaagtcttagtcttcaagggctgtcaccactacttatccctgacccggtttagccaggccctcaagtcagttagctcaggggattctgctgctatgatcgccatgcaggtcttggtctggttgactgaaaccgaaacgggagatgttgatgagcttaatattgacagcctcaaccaccccttttggcaggccattatcacccggtatagccagcttccacttttgtccgaccaggatttttataaacgcttgatccgccaagccaaatcagctgatatcgtcattaccaaccatgcccacctgattaccgacctaaaccggatgcccggccaaagagtcttgcccaactttgaccacctaatcatcgacgaagcccaacacttggccaaggtaaccgggggcttggcccaaagttcactgaacaagtctaaaatcacccgcctgctccgagccttaggggactattctagtgagggaaccctcatcgaccggatggaagactatacccaaagaaggtggctaagccaggcccaaatccaccgactagttacttgccgaagtcgcctggcagaagctgtcagctacttttttgacctcttcattccttccttagagatggaaggcagacaaggctggctggaagaggttatcgatgacccggaagccattgctgacttagaccagaccaagcgtttaggtatctgcctaaaccaattaattcaggagctccaaacaatctaccaagatttgaaaggcttccaggatgccttcgtcaagtcagaccacctcttgcttgaagacctctttactatctccaaccgattaagtgacttttaccgggattttaacaagctttttggtccttacggcagtgaccggctcatttggattgaagcctatgcttcctccttggataccagtatccggctcaagagttttagccaagggaagaagggtcaacttttagccaacctccatgccgttagccatgtcatttacatttcttctaccttgtctgtcaatcaatcggtcgacttttttgaaaagcaagtccaggctaaaaagcttaaatacctggcctatctcagcccctaccaagtcaaagaccaggctcagatcatcgtacccaaagacctggttccggttaaaaagttctccaaccaacacttggtccatcacctggtcacccaaatcatgaccatgatgaaaaacttgaaccggaaaacccttattttatttcactctcatgaagtcctccaagaggtctaccataccctgacagcttctggtatgctgtcggattatgccctcttagcccaagacctgtccgggtcacggtataaaattctcaaacaattcaaacgggctaagaagagcattctgtttgggtcggataccttttttgaagggattgacctacctggcgagttcctggaagttgttgtcctgacccggcttccctttgattcccctgacatgcctctggtgaaagatgaacaccaaaggatgaaagaagaggggatgaatatctttaaagatgacctgttgccccgggctgtcatcaagaccaagcaggcttatggccgtttgatccggtctgagaaagataggggagtttttgtcatcttggatgaccgctttctccatgctaactacgcttcgatttttcaacaatctttgccaggaggagaaaactacaagcgctgccttctaaaagatcttccccaagcggtcaaccggtttttaggggaggcttgtgaccttcatttaggctaa

SEQ ID NO: 3682 - protein, 927 aa, Alloiococcus otitidis
MEDPNLYAIVDIEATAGSLGTDERMIQFACILLEDGQVVEEFDTLVNPLRPVPIRIQKLTGISQKEVNQAPHFDEIAHIIHDLLEDAVFVAHNVNFDYRFLNERFEAVGLEPLQTKAIDTVALSRICFPQADHYNLTDLTTWLGYDIEQAHDALYDARATAFLLDKIIGKLAGLPPLTLKQVSDLSQGLAQDTQWLIDQAYNQVKDQSPDLENGLVFYEGLAIKDPKKSFDIRLSRSLKDYPLTDRDKAKFFAKSFRLRQRQGDLMDQIYYYFNKDKENEELAIEAPAGIGKSLAYLVPSVFVGKPVVISTHTRTLQDQLLEEALPFMEQVSPLKPKVLVFKGCHHYLSLTRFSQALKSVSSGDSAAMIAMQVLVWLTETETGDVDELNIDSLNHPFWQAIITRYSQLPLLSDQDFYKRLIRQAKSADIVITNHAHLITDLNRMPGQRVLPNFDHLIIDEAQHLAKVTGGLAQSSLNKSKITRLLRALGDYSSEGTLIDRMEDYTQRRWLSQAQIHRLVTCRSRLAEAVSYFFDLFIPSLEMEGRQGWLEEVIDDPEAIADLDQTKRLGICLNQLIQELQTIYQDLKGFQDAFVKSDHLLLEDLFTISNRLSDFYRDFNKLFGPYGSDRLIWIEAYASSLDTSIRLKSFSQGKKGQLLANLHAVSHVIYISSTLSVNQSVDFFEKQVQAKKLKYLAYLSPYQVKDQAQIIVPKDLVPVKKFSNQHLVHHLVTQIMTMMKNLNRKTLILFHSHEVLQEVYHTLTASGMLSDYALLAQDLSGSRYKILKQFKRAKKSILFGSDTFFEGIDLPGEFLEVVVLTRLPFDSPDMPLVKDEHQRMKEEGMNIFKDDLLPRAVIKTKQAYGRLIRSEKDRGVFVILDDRFLHANYASIFQQSLPGGENYKRCLLKDLPQAVNRFLGEACDLHLG

SEQ ID NO: 3683 - DNA, 504 bp, Alloiococcus otitidis
  CDS (37)..(501)
atccaacttgataaatccttgatcttggtaaaactcatgggtggcccggataacttcattgcggatgagcataatggcatgctgtttagaagaacgaagccacaagtggcggtggtccatcaagaagtcggtcccgtggtctttcggggtaatggggtagtcatgcgagtcactgatcacttcaatgtcttcaacctggatttcatagccaaatttggaccggtcatcttgggaaatttcaccggtaatccagatagaagtctcttggttaagatttttagcaaggtcaaaagtttcttcagacaccttgcttttcaccacgactgcttggaaaaaagccgacccgtctcgaacttgcaagaaggcaattttcccgctggagcgtttgttggcaacccaggccccaagcttcaccttttcaccgacgtggtctttagcattgataatacgaattgtttccactgctcaatctccttcattcttcttttgctctgctggctataa

SEQ ID NO: 3684 - protein, 155 aa, Alloiococcus otitidis
MGGPDNFIADEHNGMLFRRTKPQVAVVHQEVGPVVFRGNGVVMRVTDHFNVFNLDFIAKFGPVILGNFTGNPDRSLLVKIFSKVKSFFRHLAFHHDCLEKSRPVSNLQEGNFPAGAFVGNPGPKLHLFTDVVFSIDNTNCFHCSISFILLLLCWL

SEQ ID NO: 3685 - DNA, 504 bp, Alloiococcus otitidis; identical to SEQ ID NO: 3683
  CDS (19)..(501)

SEQ ID NO: 3686 - protein, 161 aa, Alloiococcus otitidis
MILVKLMGGPDNFIADEHNGMLFRRTKPQVAVVHQEVGPVVFRGNGVVMRVTDHFNVFNLDFIAKFGPVILGNFTGNPDRSLLVKIFSKVKSFFRHLAFHHDCLEKSRPVSNLQEGNFPAGAFVGNPGPKLHLFTDVVFSIDNTNCFHCSISFILLLLCWL

SEQ ID NO: 3687 - DNA, 606 bp, Alloiococcus otitidis
  CDS (148)..(603)
actggggatggggacggactaagagattgttggcacaagtcgtcagagacttattgggccccacttatttatttcaagatcataatttggtataatacccttgttatagctagaggaggaagaccagtgaccaaggtactattaggcttggctattttatttaccgggatcattctaggtggcttaaggctcttccgtgagtctacccagcccatctaccaggctcgggctgagacaacggcctatgtccaagaacatacggacctggaagaggtcaatgacttttattggtttaacggaccagaggaaagctatttttccgtgtccggcacaaatggcgaccaaactccccagctggccattgtcagaataagcgacggggccatgcaggtctttgactaccaggacattgccagtgaatacgatgtctaccagcaagttcaagcagacttgaaccctagtgaaattctcgccatccgagccggctttgtcgatgagaccacacccgtttgggaagtgtccttccttgaccaggcaggccaacttggttactattatgccaaccttgaaacagggcagtggctgcgtaccattagcaatttatag

SEQ ID NO: 3688 - protein, 152 aa, Alloiococcus otitidis
MAILFTGIILGGLRLFRESTQPIYQARAETTAYVQEHTDLEEVNDFYWFNGPEESYFSVSGTNGDQTPQLAIVRISDGAMQVFDYQDIASEYDVYQQVQADLNPSEILAIRAGFVDETTPVWEVSFLDQAGQLGYYYANLETGQWLRTISNL

SEQ ID NO: 3689 - DNA, 606 bp, Alloiococcus otitidis; identical to SEQ ID NO: 3687
  CDS (127)..(603)

SEQ ID NO: 3690 - protein, 159 aa, Alloiococcus otitidis
MTKVLLGLAILFTGIILGGLRLFRESTQPIYQARAETTAYVQEHTDLEEVNDFYWFNGPEESYFSVSGTNGDQTPQLAIVRISDGAMQVFDYQDIASEYDVYQQVQADLNPSEILAIRAGFVDETTPVWEVSFLDQAGQLGYYYANLETGQWLRTISNL

SEQ ID NO: 3691 - DNA, 1299 bp, Alloiococcus otitidis
  CDS (346)..(1296)
gcagtggaaacaattcgtattatcaatgctaaagaccacgtcggtgaaaaggtgaagcttggggcctgggttgccaacaaacgctccagcgggaaaattgccttcttgcaagttcgagacgggtcggcttttttccaagcagtcgtggtgaaaagcaaggtgtctgaagaaacttttgaccttgctaaaaatcttaaccaagagacttctatctggattaccggtgaaatttcccaagatgaccggtccaaatttggctatgaaatccaggttgaagacattgaagtgatcagtgactcgcatgactaccccattaccccgaaagaccacgggaccgacttcttgatggaccaccgccacttgtggcttcgttcttctaaacagcatgccattatgctcatccgcaatgaagttatccgggccacccatgagttttaccaagatcaaggatttatcaagttggattcacctatcttggtgggcaatgctggggaaaataccaccgacctcttccaaactgagtattttgaccaaaaagcctacctggcccaaactggccagctctatgctgaggctgcagccttggcctttggcaaggtctacaccttggggccgactttccgggctgagaagtccaaaacccggcgtcacctgattgaattttggatgattgaacctgaaatggcctttgtggaacacgaagaatccctaaaaatccaagaagaatatgtttcccacttaattaacagtgtcttagacaattgcgactatgccttagaggttttgggtcgggaccaggacaaattgcgccagtttgcccaactgccttacccaaggatctcttatgaccaggctattgaaatcctgcaagaaaatgactttgacattgaatggggggccgactttgggtcaccggaagagaccttcctggcctcccaatatgaccgtcccatctttatcaccaactatcccaaagccatcaaggccttctacatgaaagagcacccggaccggtctgatgtggttatttgtgccgacatgatcgccccagaaggttacggtgagattatcggtggttcacagcgggaagacaacttggacaaactcttagaagaaattgagaacttcggtttgggaacggaagaatatgaatggtacctggacctccgccgttatggatcagtcccccactccggctttggacttggcttagagcggacagtgacatggttggcggggattgaacacattcgtgaagcttcccccttcccaagactactcaaccgaatttacccataa

SEQ ID NO: 3692 - protein, 317 aa, Alloiococcus otitidis
MDHRHLWLRSSKQHAIMLIRNEVIRATHEFYQDQGFIKLDSPILVGNAGENTTDLFQTEYFDQKAYLAQTGQLYAEAAALAFGKVYTLGPTFRAEKSKTRRHLIEFWMIEPEMAFVEHEESLKIQEEYVSHLINSVLDNCDYALEVLGRDQDKLRQFAQLPYPRISYDQAIEILQENDFDIEWGADFGSPEETFLASQYDRPIFITNYPKAIKAFYMKEHPDRSDVVICADMIAPEGYGEIIGGSQREDNLDKLLEEIENFGLGTEEYEWYLDLRRYGSVPHSGFGLGLERTVTWLAGIEHIREASPFPRLLNRIYP

SEQ ID NO: 3693 - DNA, 1299 bp, Alloiococcus otitidis; identical to SEQ ID NO: 3691
  CDS (106)..(1296)

SEQ ID NO: 3694 - protein, 397 aa, Alloiococcus otitidis
MQVRDGSAFFQAVVVKSKVSEETFDLAKNLNQETSIWITGEISQDDRSKFGYEIQVEDIEVISDSHDYPITPKDHGTDFLMDHRHLWLRSSKQHAIMLIRNEVIRATHEFYQDQGFIKLDSPILVGNAGENTTDLFQTEYFDQKAYLAQTGQLYAEAAALAFGKVYTLGPTFRAEKSKTRRHLIEFWMIEPEMAFVEHEESLKIQEEYVSHLINSVLDNCDYALEVLGRDQDKLRQFAQLPYPRISYDQAIEILQENDFDIEWGADFGSPEETFLASQYDRPIFITNYPKAIKAFYMKEHPDRSDVVICADMIAPEGYGEIIGGSQREDNLDKLLEEIENFGLGTEEYEWYLDLRRYGSVPHSGFGLGLERTVTWLAGIEHIREASPFPRLLNRIYP

SEQ ID NO: 3695 - DNA, 1299 bp, Alloiococcus otitidis; identical to SEQ ID NO: 3691
  CDS (4)..(1296)

SEQ ID NO: 3696 - protein, 431 aa, Alloiococcus otitidis
METIRIINAKDHVGEKVKLGAWVANKRSSGKIAFLQVRDGSAFFQAVVVKSKVSEETFDLAKNLNQETSIWITGEISQDDRSKFGYEIQVEDIEVISDSHDYPITPKDHGTDFLMDHRHLWLRSSKQHAIMLIRNEVIRATHEFYQDQGFIKLDSPILVGNAGENTTDLFQTEYFDQKAYLAQTGQLYAEAAALAFGKVYTLGPTFRAEKSKTRRHLIEFWMIEPEMAFVEHEESLKIQEEYVSHLINSVLDNCDYALEVLGRDQDKLRQFAQLPYPRISYDQAIEILQENDFDIEWGADFGSPEETFLASQYDRPIFITNYPKAIKAFYMKEHPDRSDVVICADMIAPEGYGEIIGGSQREDNLDKLLEEIENFGLGTEEYEWYLDLRRYGSVPHSGFGLGLERTVTWLAGIEHIREASPFPRLLNRIYP

SEQ ID NO: 3697 - DNA, 756 bp, Alloiococcus otitidis
  CDS (22)..(753)
atagaaaggagagggcacatgatggatcaatcgctcattaaaaaatgggttaaggctggtaacttgaccatttcccgtctagttttggcccattaccgagatcttggcctagacgaagtagacctcgtgaccttgctggaacttaagtcggacttggaccaggggcaagtctttcctgaccccaaggacctggccaagcggatgcatatcagccaggaccaggcctttgaccggatccactccttgatccagaagaaggtcttagagatccaaacagctaagggacctgacgggaaaagtcaggatgtctatagtctagatcctctgtacaaccggcttctgacttatttggaccaaaaccagcacaaggaagaggctaaaaaccaagaagaggcagccaatcgcttgtacaagatgtttgaatctgaatttggccggcccttgtctcccattgaaattgaaaccatctctgcctggattgatgaagacaagtaccagcccggattaatccaaatggctttaaaacaagcggtcttaaaccaggtctacaacctgcgctatatcgaccggattttactcagctggcaacgaaaaaatattcggaccaaggaccaggtcctagctgaagaagaaaagtatcgcaaggctaaggaaggtcggagtcagccaggttctgatcagtcaggcaaccagccacaagttcccctctatgactggcttcatgacctgaaagacaaggaccagtcacaggagtag

SEQ ID NO: 3698 - protein, 244 aa, Alloiococcus otitidis
MDQSLIKKWVKAGNLTISRLVLAHYRDLGLDEVDLVTLLELKSDLDQGQVFPDPKDLAKRMHISQDQAFDRIHSLIQKKVLEIQTAKGPDGKSQDVYSLDPLYNRLLTYLDQNQHKEEAKNQEEAANRLYKMFESEFGRPLSPIEIETISAWIDEDKYQPGLIQMALKQAVLNQVYNLRYIDRILLSWQRKNIRTKDQVLAEEEKYRKAKEGRSQPGSDQSGNQPQVPLYDWLHDLKDKDQSQE

SEQ ID NO: 3699 - DNA, 756 bp, Alloiococcus otitidis; identical to SEQ ID NO: 3697
  CDS (19)..(753)

SEQ ID NO: 3700 - protein, 245 aa, Alloiococcus otitidis
MMDQSLIKKWVKAGNLTISRLVLAHYRDLGLDEVDLVTLLELKSDLDQGQVFPDPKDLAKRMHISQDQAFDRIHSLIQKKVLEIQTAKGPDGKSQDVYSLDPLYNRLLTYLDQNQHKEEAKNQEEAANRLYKMFESEFGRPLSPIEIETISAWIDEDKYQPGLIQMALKQAVLNQVYNLRYIDRILLSWQRKNIRTKDQVLAEEEKYRKAKEGRSQPGSDQSGNQPQVPLYDWLHDLKDKDQSQE

SEQ ID NO: 3701 - DNA, 312 bp, Alloiococcus otitidis
  CDS (85)..(309)
cgaccaaagaaaatcatccaatggtgggcctggctccacaattcttttggcaacttgtcattgagtcttttttcgacctgggtaatggagtcgtcttctgctgctatatggaatttcttggcaatccggttaacatgggtatcgacagcaatagctggttcttcaaaggccacactcatgaccacattagccgttttccgccctaccccggccaagctctctaggtcctttcggttagaaggcacctggccattaaacttgtccacgatatcgctggcgcattgcttgataaattttgccttgttgcggtag

SEQ ID NO: 3702 - protein, 75 aa, Alloiococcus otitidis
MESSSAAIWNFLAIRLTWVSTAIAGSSKATLMTTLAVFRPTPAKLSRSFRLEGTWPLNLSTISLAHCLINFALLR

SEQ ID NO: 3703 - DNA, 312 bp, Alloiococcus otitidis; identical to SEQ ID NO: 3701
  CDS (55)..(309)

SEQ ID NO: 3704 - protein, 85 aa, Alloiococcus otitidis
MSLSLFSTWVMESSSAAIWNFLAIRLTWVSTAIAGSSKATLMTTLAVFRPTPAKLSRSFRLEGTWPLNLSTISLAHCLINFALLR

SEQ ID NO: 3705 - DNA, 717 bp, Alloiococcus otitidis
  CDS (118)..(714)
gtcaactattcccaatctggcagccatttatatgaaaggtcaaaaaacaaccaggaaggtgttagcaagttgacaaaattattatccagtaaggaaacaacccaggtggtcaaggcaatgggcaagcttttcccaaatgccaaggcagaactcaaccatgacaatgcctttcagcttttaatagctgttattttgagtgcccaaaccacggatacggcagtaaacaaggtgacgtccaagctctttgaagcctatccccggccagaagacttgaaagaggccgaccaagcagatattgaagacaagatcaaaaccatcggcctctaccgcaacaaggcaaaatttatcaagcaatgcgccagcgatatcgtggacaagtttaatggccaggtgccttctaaccgaaaggacctagagagcttggccggggtagggcggaaaacggctaatgtggtcatgagtgtggcctttgaagaaccagctattgctgtcgatacccatgttaaccggattgccaagaaattccatatagcagcagaagacgactccattacccaggtcgaaaaaagactcaatgacaagttgccaaaagaattgtggagccaggcccaccattggatgattttctttggtcgctaccaatgtccagcccgcaagcacgaccatgaagaatgtgtccgcaaggtttatgatattatcgataaagaagaactctag

SEQ ID NO: 3706 - protein, 199 aa, Alloiococcus otitidis
MGKLFPNAKAELNHDNAFQLLIAVILSAQTTDTAVNKVTSKLFEAYPRPEDLKEADQADIEDKIKTIGLYRNKAKFIKQCASDIVDKFNGQVPSNRKDLESLAGVGRKTANVVMSVAFEEPAIAVDTHVNRIAKKFHIAAEDDSITQVEKRLNDKLPKELWSQAHHWMIFFGRYQCPARKHDHEECVRKVYDIIDKEEL

SEQ ID NO: 3707 - DNA, 717 bp, Alloiococcus otitidis; identical to SEQ ID NO: 3705
  CDS (106)..(714)

SEQ ID NO: 3708 - protein, 203 aa, Alloiococcus otitidis
MVKAMGKLFPNAKAELNHDNAFQLLIAVILSAQTTDTAVNKVTSKLFEAYPRPEDLKEADQADIEDKIKTIGLYRNKAKFIKQCASDIVDKFNGQVPSNRKDLESLAGVGRKTANVVMSVAFEEPAIAVDTHVNRIAKKFHIAAEDDSITQVEKRLNDKLPKELWSQAHHWMIFFGRYQCPARKHDHEECVRKVYDIIDKEEL

SEQ ID NO: 3709 - DNA, 717 bp, Alloiococcus otitidis; identical to SEQ ID NO: 3705
  CDS (70)..(714)

SEQ ID NO: 3710 - protein, 215 aa, Alloiococcus otitidis
MTKLLSSKETTQVVKAMGKLFPNAKAELNHDNAFQLLIAVILSAQTTDTAVNKVTSKLFEAYPRPEDLKEADQADIEDKIKTIGLYRNKAKFIKQCASDIVDKFNGQVPSNRKDLESLAGVGRKTANVVMSVAFEEPAIAVDTHVNRIAKKFHIAAEDDSITQVEKRLNDKLPKELWSQAHHWMIFFGRYQCPARKHDHEECVRKVYDIIDKEEL

SEQ ID NO: 3711 - DNA, 1710 bp, Alloiococcus otitidis
  CDS (244)..(1707)
aaaggagtgcgaataatgacttttgatggtttgtttacacatgcaatggttcaagaattaaaccgagacttaaaaggaggtaagatagccaaagtctaccaaccctatgaaaacgaaattatcctccgtatccgggccaaccgccaaaaccaaaacctcctcctgtccgcccactcccaatatgccagaatccaaatcagccagcaagacttcaccaacccccaagagccaccccatttttgtatgattttacgtaaatacttggaaaatggggtgctccagtccatccaccaggtcgaaaatgaccgggtcgtccacttcaatatagccagccgcaatgaactgggagaccagatggatattatcttagtcgttgaaatcatgggccggcattccaatattatcctgctggaccgagctgacaatacaattatcaacagcatcaagcacatctcgccgagccaaaactcctaccgcactattttacccaatagcccctacaaacctgctcccagccaggacaaggtcaacccctatgacttctccgaccttaaccaggtgaccaaagaatccaaaaaagctagccaaaaagccattcaagataacctgcaaggcttctcccgccaagctgccaaggagctggctgaacgcttggaccaagcctcaaaccccgaccagacctaccaagactttatccaggcctttgacctggcaggactgcaacccagcctttaccaattggaccagggcaaggaaaaattcactgccttcccctactccactttagcaggtgaccgagtagactacaggactttaagccagctcttagaccgcttttatgaccaaaaggctgaacgagaccgaacccaccaattggcttccgacctctttagcctggtcaacaatgaattgaaaaaaaacagcaaaaagctggacaaaattataaaagagcaagaagaaagccaagctgctgacagctaccgagtcaaaggagaagtactcacagcctacctgcatgaggtccaacaagggatgtcttccatcaagctggataacttttatgaagagggtcaaattgagattgacctggacccgcaaaaatcaccagccgacaatgcccaagcctacttttcgcgctaccaaaagatgaaaacccggcaaaagcggctgaaagaacaaatccaggctacccgccaggaaattgactacctggaatccgtcctggcccagctggatgtcgtctcccaagaagatatcgaagaggtccgggatgaactccgcagccagggctacctcaagatcaaaaccaagaagaaaaaaggcaaaaaacaaaagaaatccaaacccttccactttaaggccagcgacgggaccgatatcctggttggccgcaacaacactcaaaacgacgaattaactggccggatagccaataaaaacgactggtggctccacacccaaaacatccccggctcccatgtcattgtccggtcagccaatcctagcgaccaaacattagaagaagcggccatgctagcagcttattacagcaagtaccgtgaatcagcttccgtcccggtcgacactgtccaagtcaagtacgttaacaagccaaagggggccaaacccggttttgtcacctatgaaggccaaaccacctattttgtcacccccagcaaggacaaggtgcaaaaattagctgttaagtaa

SEQ ID NO: 3712 - protein, 488 aa, Alloiococcus otitidis
MILRKYLENGVLQSIHQVENDRVVHFNIASRNELGDQMDIILVVEIMGRHSNIILLDRADNTIINSIKHISPSQNSYRTILPNSPYKPAPSQDKVNPYDFSDLNQVTKESKKASQKAIQDNLQGFSRQAAKELAERLDQASNPDQTYQDFIQAFDLAGLQPSLYQLDQGKEKFTAFPYSTLAGDRVDYRTLSQLLDRFYDQKAERDRTHQLASDLFSLVNNELKKNSKKLDKIIKEQEESQAADSYRVKGEVLTAYLHEVQQGMSSIKLDNFYEEGQIEIDLDPQKSPADNAQAYFSRYQKMKTRQKRLKEQIQATRQEIDYLESVLAQLDVVSQEDIEEVRDELRSQGYLKIKTKKKKGKKQKKSKPFHFKASDGTDILVGRNNTQNDELTGRIANKNDWWLHTQNIPGSHVIVRSANPSDQTLEEAAMLAAYYSKYRESASVPVDTVQVKYVNKPKGAKPGFVTYEGQTTYFVTPSKDKVQKLAVK

SEQ ID NO: 3713 - DNA, 1710 bp, Alloiococcus otitidis; identical to SEQ ID NO: 3711
  CDS (16)..(1707)

SEQ ID NO: 3714 - protein, 564 aa, Alloiococcus otitidis
MTFDGLFTHAMVQELNRDLKGGKIAKVYQPYENEIILRIRANRQNQNLLLSAHSQYARIQISQQDFTNPQEPPHFCMILRKYLENGVLQSIHQVENDRVVHFNIASRNELGDQMDIILVVEIMGRHSNIILLDRADNTIINSIKHISPSQNSYRTILPNSPYKPAPSQDKVNPYDFSDLNQVTKESKKASQKAIQDNLQGFSRQAAKELAERLDQASNPDQTYQDFIQAFDLAGLQPSLYQLDQGKEKFTAFPYSTLAGDRVDYRTLSQLLDRFYDQKAERDRTHQLASDLFSLVNNELKKNSKKLDKIIKEQEESQAADSYRVKGEVLTAYLHEVQQGMSSIKLDNFYEEGQIEIDLDPQKSPADNAQAYFSRYQKMKTRQKRLKEQIQATRQEIDYLESVLAQLDVVSQEDIEEVRDELRSQGYLKIKTKKKKGKKQKKSKPFHFKASDGTDILVGRNNTQNDELTGRIANKNDWWLHTQNIPGSHVIVRSANPSDQTLEEAAMLAAYYSKYRESASVPVDTVQVKYVNKPKGAKPGFVTYEGQTTYFVTPSKDKVQKLAVK

SEQ ID NO: 3715 - DNA, 1710 bp, Alloiococcus otitidis; identical to SEQ ID NO: 3711
  CDS (7)..(1707)

SEQ ID NO: 3716 - protein, 567 aa, Alloiococcus otitidis
MRIMTFDGLFTHAMVQELNRDLKGGKIAKVYQPYENEIILRIRANRQNQNLLLSAHSQYARIQISQQDFTNPQEPPHFCMILRKYLENGVLQSIHQVENDRVVHFNIASRNELGDQMDIILVVEIMGRHSNIILLDRADNTIINSIKHISPSQNSYRTILPNSPYKPAPSQDKVNPYDFSDLNQVTKESKKASQKAIQDNLQGFSRQAAKELAERLDQASNPDQTYQDFIQAFDLAGLQPSLYQLDQGKEKFTAFPYSTLAGDRVDYRTLSQLLDRFYDQKAERDRTHQLASDLFSLVNNELKKNSKKLDKIIKEQEESQAADSYRVKGEVLTAYLHEVQQGMSSIKLDNFYEEGQIEIDLDPQKSPADNAQAYFSRYQKMKTRQKRLKEQIQATRQEIDYLESVLAQLDVVSQEDIEEVRDELRSQGYLKIKTKKKKGKKQKKSKPFHFKASDGTDILVGRNNTQNDELTGRIANKNDWWLHTQNIPGSHVIVRSANPSDQTLEEAAMLAAYYSKYRESASVPVDTVQVKYVNKPKGAKPGFVTYEGQTTYFVTPSKDKVQKLAVK

SEQ ID NO: 3717 - DNA, 312 bp, Alloiococcus otitidis
  CDS (61)..(309)
ttcgtcgttttgagtgttgttgcggccaaccaggatatcggtcccgtcgctggccttaaagtggaagggtttggatttcttttgttttttgccttttttcttcttggttttgatcttgaggtagccctggctgcggagttcatcccggacctcttcgatatcttcttgggagacgacatccagctgggccaggacggattccaggtagtcaatttcctggcgggtagcctggatttgttctttcagccgcttttgccgggttttcatcttttggtagcgcgaaaagtaggcttgggcattgtcggctggtga

SEQ ID NO: 3718 - protein, 83 aa, Alloiococcus otitidis
MEGFGFLLFFAFFLLGFDLEVALAAEFIPDLFDIFLGDDIQLGQDGFQVVNFLAGSLDLFFQPLLPGFHLLVARKVGLGIVGW

SEQ ID NO: 3719 - DNA, 456 bp, Alloiococcus otitidis
  CDS (64)..(453)
atcaagtgttttaggagggctgtcatgtctggtggagtggacatacgaaccttgttggaccggatggatgagtttacccgcttgcaccgcaagttaaaccaaatgattttggactattatcatttaacggaatccagcgtcttcctgtttgatattatccaggatgaccaaatgaccttaaaagatatcacccaggctagtaaactggacaagtcaactattagccgccaagtcaataacctggtcaaaaaagacctcttgaaaaaattaccaggccaagataagcgttacgcttatttcgagatgaccaagtttgctaaggaccgctaccaatcctaccaagaagaagcagaccgagcttttgccgaccttttgtcttcttggaccgaggatgaaaagcagaaattatccattttactgatgcggttaaaccgggtctaccagtctgctatttaa

SEQ ID NO: 3720 - protein, 130 aa, Alloiococcus otitidis
MDEFTRLHRKLNQMILDYYHLTESSVFLFDIIQDDQMTLKDITQASKLDKSTISRQVNNLVKKDLLKKLPGQDKRYAYFEMTKFAKDRYQSYQEEADRAFADLLSSWTEDEKQKLSILLMRLNRVYQSAI

SEQ ID NO: 3721 - DNA, 456 bp, Alloiococcus otitidis; identical to SEQ ID NO: 3719
  CDS (25)..(453)

SEQ ID NO: 3722 - protein, 143 aa, Alloiococcus otitidis
MSGGVDIRTLLDRMDEFTRLHRKLNQMILDYYHLTESSVFLFDIIQDDQMTLKDITQASKLDKSTISRQVNNLVKKDLLKKLPGQDKRYAYFEMTKFAKDRYQSYQEEADRAFADLLSSWTEDEKQKLSILLMRLNRVYQSAI

SEQ ID NO: 3723 - DNA, 585 bp, Alloiococcus otitidis
  CDS (313)..(582)
atgaatcgacctaaacaaaccagtcgtttgactcggatgggaattattacagccattttgcttatccaaaacatgatcccttttttggggaatattcctattccacctttgaaccccactattattcatgtcacagttattgttgtggccttgtcaatggggatgaaggacgggatgattgctggtttaatctgggggctcatccggctatttcgtgcctttgccatgccggccaccccacttgaccccttaatttgggtcaaccccattatcaccattgtcccgagactcttaatcgggaccactaccgttttgacttatcaattactacataacaaagtgaggaataacaagctatcgatgggggtcgcatcttttatcgggtctatgaccaataccctattggtgatgttgtttatctacttatttttcaatgccgaaattgggcaagcaatgggtattgatgccagtaacctaggctatgccttgcttgtcattattgtgaccagtggtttagctgaagcggttttggctgcagttctagcaccgattgtggtccaggctttgaagcggttgcgacggtaa

SEQ ID NO: 3724 - protein, 90 aa, Alloiococcus otitidis
MTYQLLHNKVRNNKLSMGVASFIGSMTNTLLVMLFIYLFFNAEIGQAMGIDASNLGYALLVIIVTSGLAEAVLAAVLAPIVVQALKRLRR

SEQ ID NO: 3725 - DNA, 585 bp, Alloiococcus otitidis; identical to SEQ ID NO: 3723
  CDS (37)..(582)

SEQ ID NO: 3726 - protein, 182 aa, Alloiococcus otitidis
MGIITAILLIQNMIPFLGNIPIPPLNPTIIHVTVIVVALSMGMKDGMIAGLIWGLIRLFRAFAMPATPLDPLIWVNPIITIVPRLLIGTTTVLTYQLLHNKVRNNKLSMGVASFIGSMTNTLLVMLFIYLFFNAEIGQAMGIDASNLGYALLVIIVTSGLAEAVLAAVLAPIVVQALKRLRR

SEQ ID NO: 3727 - DNA, 585 bp, Alloiococcus otitidis; identical to SEQ ID NO: 3723
  CDS (1)..(582)

SEQ ID NO: 3728 - protein, 194 aa, Alloiococcus otitidis
MNRPKQTSRLTRMGIITAILLIQNMIPFLGNIPIPPLNPTIIHVTVIVVALSMGMKDGMIAGLIWGLIRLFRAFAMPATPLDPLIWVNPIITIVPRLLIGTTTVLTYQLLHNKVRNNKLSMGVASFIGSMTNTLLVMLFIYLFFNAEIGQAMGIDASNLGYALLVIIVTSGLAEAVLAAVLAPIVVQALKRLRR

SEQ ID NO: 3729 - DNA, 699 bp, Alloiococcus otitidis
  CDS (19)..(696)
agaaaaggaggaaatggtatgagtgatgaataccaaacaagagcggaaagaaacaagaataagaaaaatcaaaattttgcccgggctgacaagcaagataagcgagacaagaagaaaacttcaacctttgataaaatcttctatatcttaattgccctcttatttttaatcttagttgcctttataatcgttattatgaacttcagcgatggacgggctgataatgtatctgaagatttagtccaggaagataccattggcaatattcgtgacttgttccaggctgatggtagtggggatgaaggtggtgaagcaggtggtcaaggggaggacccagaccaagagtcagaagcacaggaagaagatactgatcaagatgaccaggaagaagacccagaagatgaggaagaaggggaagacggtcagggcgacgaatcgattatcaacgaaaacccaccccacgaccccaaccatgccaccgactactcggatgggtcagctgaccgcgtagaaatccgtgacaaggtccaaaccgtcacagggattgcggagggcgacttgattgaaaactggattggcaatgacggaccgggccgggttgaagcaacggtaactgaggcttcgaccggccagcaatatgtcgtctacttgcagtacggggaaggagagtggcatgtcgaaagttacagtcaacgatag

SEQ ID NO: 3730 - protein, 226 aa, Alloiococcus otitidis
MSDEYQTRAERNKNKKNQNFARADKQDKRDKKKTSTFDKIFYILIALLFLILVAFIIVIMNFSDGRADNVSEDLVQEDTIGNIRDLFQADGSGDEGGEAGGQGEDPDQESEAQEEDTDQDDQEEDPEDEEEGEDGQGDESIINENPPHDPNHATDYSDGSADRVEIRDKVQTVTGIAEGDLIENWIGNDGPGRVEATVTEASTGQQYVVYLQYGEGEWHVESYSQR

SEQ ID NO: 3731 - DNA, 585 bp, Alloiococcus otitidis
  CDS (31)..(582)
acaattaaaatgaatgaaaagaagagaagggtggtgaaaagcgtgcaaaatgcttttaatatattaaaaaaagaaataaaggctaacattgaaaccatgttgattctctttgtcatttggatcgtcttattcgaagaaataacccccttcgtccttatttccggtatcatcttatcagtaggggtgattgtctttaccgaccaatttttgttgatttacggcaactatgaagatcggtatatgttgaatgtgggtcagattatccgctatgctttggttttattgattgaaattttctctgccggttggtccgtcattccaaacattgtcaaaggcgaaagcgatgtggccatcataactgttgtgaccgacttaaaggatgaattcttagtcgatatgttggccaactcagtcaccttaaccccagggacagtaactgtggagaaaaacggaagtgaactccgaatcctatccttggaatcggaaggacttgatgaggatccccaccaagttttacccctcaaggtcgaaaaattactgttgaaatttgaagaagagcagaaaggaaataaagagggtagataa

SEQ ID NO: 3732 - protein, 184 aa, Alloiococcus otitidis
MVKSVQNAFNILKKEIKANIETMLILFVIWIVLFEEITPFVLISGIILSVGVIVFTDQFLLIYGNYEDRYMLNVGQIIRYALVLLIEIFSAGWSVIPNIVKGESDVAIITVVTDLKDEFLVDMLANSVTLTPGTVTVEKNGSELRILSLESEGLDEDPHQVLPLKVEKLLLKFEEEQKGNKEGR

SEQ ID NO: 3733 - DNA, 585 bp, Alloiococcus otitidis; identical to SEQ ID NO: 3731
  CDS (10)..(582)

SEQ ID NO: 3734 - protein, 191 aa, Alloiococcus otitidis
MNEKKRRVVKSVQNAFNILKKEIKANIETMLILFVIWIVLFEEITPFVLISGIILSVGVIVFTDQFLLIYGNYEDRYMLNVGQIIRYALVLLIEIFSAGWSVIPNIVKGESDVAIITVVTDLKDEFLVDMLANSVTLTPGTVTVEKNGSELRILSLESEGLDEDPHQVLPLKVEKLLLKFEEEQKGNKEGR

SEQ ID NO: 3735 - DNA, 267 bp, Alloiococcus otitidis
  CDS (7)..(264)
ataaagatgtcttttgatttatttgtattaattgccatgatgatcctatcgttaggtgccatctaccgtgtgatcatgggaccaactgtttgggaccgacttctcggctcgtcctttttttctgctaaggctatcgtgatggcggttgttctcggtgttgtaatcaatcgtacatacatggttgatgtcggcattatttacggaattctaggctttgtgagtgtgataatgattgcacggttcatagaaagaaaaggtgatatttag

SEQ ID NO: 3736 - protein, 86 aa, Alloiococcus otitidis
MSFDLFVLIAMMILSLGAIYRVIMGPTVWDRLLGSSFFSAKAIVMAVVLGVVINRTYMVDVGIIYGILGFVSVIMIARFIERKGDI

SEQ ID NO: 3737 - DNA, 312 bp, Alloiococcus otitidis
  CDS (16)..(309)
tatttagtggatgccttgaccaatttaatcgctaatatcatcattattattggcttgattttcacggccctgggagtctttggaaccttccgctttaatgacttttttaaccggatcctggtgacttctaaggtggatacggttggctttattaccattttgctgggttatatgatccggatgggcttttccttctttaccttgaaagtcttaatcctattagttttttatattatcaccaaccctattgccacccacgctactgtccggtctgccgatttaagagactacaagattaagaaggagaaatag

SEQ ID NO: 3738 - protein, 98 aa, Alloiococcus otitidis
MTNLIANIIIIIGLIFTALGVFGTFRFNDFFNRILVTSKVDTVGFITILLGYMIRMGFSFFTLKVLILLVFYIITNPIATHATVRSADLRDYKIKKEK

SEQ ID NO: 3739 - DNA, 312 bp, Alloiococcus otitidis; identical to SEQ ID NO: 3737
  CDS (7)..(309)

SEQ ID NO: 3740 - protein, 101 aa, Alloiococcus otitidis
MDALTNLIANIIIIIGLIFTALGVFGTFRFNDFFNRILVTSKVDTVGFITILLGYMIRMGFSFFTLKVLILLVFYIITNPIATHATVRSADLRDYKIKKEK

SEQ ID NO: 3741 - DNA, 561 bp, Alloiococcus otitidis
  CDS (4)..(558)
ccaatgtatgaaatcatcttacttatttccctagtcatcttggcttttgtcagtgttcaggcggaaaacctcatgcggacggtcatttacttagaggtcttttctctcctcatggccttagcctttctctactataatgcccctgacgtggccctggctgaaacggctatcggggtcggtttgtcaaccattatttacttagttgccatcaaaaaagtccgggtctatgacttggtttacatccacgagggaattgagcactttgatgactcagagattagggctattcaaaacaccattgtccgtccccttgagaaatttatcgaagagacggtagagcttgaaccccaagtaacctatactgaccaagatgttcaagccctactggataaggacaagcacgatatcattattgtcaataaggaagacttgatctatctttacggttataccaatgaccaagtcttccaggatatcgtcgggaacatgtatgatatcttagaaagtatcgacgacatccgtgtcgtataccgggaccaggaggtggcaacaaatgagtag

SEQ ID NO: 3742 - protein, 185 aa, Alloiococcus otitidis
MYEIILLISLVILAFVSVQAENLMRTVIYLEVFSLLMALAFLYYNAPDVALAETAIGVGLSTIIYLVAIKKVRVYDLVYIHEGIEHFDDSEIRAIQNTIVRPLEKFIEETVELEPQVTYTDQDVQALLDKDKHDIIIVNKEDLIYLYGYTNDQVFQDIVGNMYDILESIDDIRVVYRDQEVATNE

SEQ ID NO: 3743 - DNA, 759 bp, Alloiococcus otitidis
  CDS (73)..(756)
aaagtatcgacgacatccgtgtcgtataccgggaccaggaggtggcaacaaatgagtagtcgagctaattccatgatgttttatatccgcgtcctcctaaccttggctggaattgccgtggttgtttaccattttgtcaactttaatgaagacctgggtgcccccttgatggaattctttaccgataatttctatgctgagactggggctaagaacgctgtagctgggatttacttaaactaccggatgttcgataccctctttgaagccttaatgcttttggtatcggttatggaggttatcaatgtttcctggtccaacaagcaccctgctgccaaacctggacggccgaagatgattactttaaaaagcaattccgagatcataatccggatgatggggattgtctatccatttgttgtcttaattggtctttatgtcatcttaaatgggcacgtatctccaggcggtggcttccaaggagggaccattcttgcaacggcccttattacccgttacttagtctaccctaactttgacattgacttagacctgatggaaaccttcgaaaaaatcctctttatttttattatcctagtcccagtgacctatatctttattgacctcgtgcctaagtctaactttaccaatgaaacttacatgattataatgaacaccttgatcggcctgaaagttttctgtggcttaagtgtgatcttttatcgcttcgtattctttgaaggggcaagtaacgactaa

SEQ ID NO: 3744 - protein, 228 aa, Alloiococcus otitidis
MMFYIRVLLTLAGIAVVVYHFVNFNEDLGAPLMEFFTDNFYAETGAKNAVAGIYLNYRMFDTLFEALMLLVSVMEVINVSWSNKHPAAKPGRPKMITLKSNSEIIIRMMGIVYPFVVLIGLYVILNGHVSPGGGFQGGTILATALITRYLVYPNFDIDLDLMETFEKILFIFIILVPVTYIFIDLVPKSNFTNETYMIIMNTLIGLKVFCGLSVIFYRFVFFEGASND

SEQ ID NO: 3745 - DNA, 759 bp, Alloiococcus otitidis; identical to SEQ ID NO: 3743
  CDS (52)..(756)

SEQ ID NO: 3746 - protein, 235 aa, Alloiococcus otitidis
MSSRANSMMFYIRVLLTLAGIAVVVYHFVNFNEDLGAPLMEFFTDNFYAETGAKNAVAGIYLNYRMFDTLFEALMLLVSVMEVINVSWSNKHPAAKPGRPKMITLKSNSEIIIRMMGIVYPFVVLIGLYVILNGHVSPGGGFQGGTILATALITRYLVYPNFDIDLDLMETFEKILFIFIILVPVTYIFIDLVPKSNFTNETYMIIMNTLIGLKVFCGLSVIFYRFVFFEGASND

SEQ ID NO: 3747 - DNA, 759 bp, Alloiococcus otitidis; identical to SEQ ID NO: 3743
  CDS (19)..(756)

SEQ ID NO: 3748 - protein, 246 aa, Alloiococcus otitidis
MSYTGTRRWQQMSSRANSMMFYIRVLLTLAGIAVVVYHFVNFNEDLGAPLMEFFTDNFYAETGAKNAVAGIYLNYRMFDTLFEALMLLVSVMEVINVSWSNKHPAAKPGRPKMITLKSNSEIIIRMMGIVYPFVVLIGLYVILNGHVSPGGGFQGGTILATALITRYLVYPNFDIDLDLMETFEKILFIFIILVPVTYIFIDLVPKSNFTNETYMIIMNTLIGLKVFCGLSVIFYRFVFFEGASND

SEQ ID NO: 3749 - DNA, 357 bp, Alloiococcus otitidis
  CDS (10)..(354)
atgaagtttatggaatttgcaaatggccagattgttggcattatcatatttttcgtcggcctttatggcttgatgactaaaaaatccattatcaaaaccattgtttccatgtccattatggagtccggtatttacttattttatgtcaatatcaactttgactacgccagtgtaccacctattggggatattgaagggatcttggtggctgaccccgtaccatcggccttgatgattacagccattgttatcggaataggggttaccgctattggcttgaccatgttcatgcactacaagcaagaacacggtattacccactggacccgggattcgagtaaaggacgtggaagatga

SEQ ID NO: 3750 - protein, 115 aa, Alloiococcus otitidis
MEFANGQIVGIIIFFVGLYGLMTKKSIIKTIVSMSIMESGIYLFYVNINFDYASVPPIGDIEGILVADPVPSALMITAIVIGIGVTAIGLTMFMHYKQEHGITHWTRDSSKGRGR

SEQ ID NO: 3751 - DNA, 357 bp, Alloiococcus otitidis; identical to SEQ ID NO: 3749
  CDS (1)..(354)

SEQ ID NO: 3752 - protein, 118 aa, Alloiococcus otitidis
MKFMEFANGQIVGIIIFFVGLYGLMTKKSIIKTIVSMSIMESGIYLFYVNINFDYASVPPIGDIEGILVADPVPSALMITAIVIGIGVTAIGLTMFMHYKQEHGITHWTRDSSKGRGR

SEQ ID NO: 3753 - DNA, 1614 bp, Alloiococcus otitidis
  CDS (1267)..(1611)
aggacgtggaagatgatgcccctttatttatttgtcctcttgcccattgtggcggggctcgtctcttatggcttaaagggcatcatccgaaatatctttctcctcgtgttccagtttctttttgcaggctatgctttttacctcttttttaccgtttctgaccagggttccattttgtggaactcagctggctaccaagacggcttggccttgtccctctatgccgataccttgagtacttttttgattttgattaccgctgttttattcatgttctaccttatttacgggtcgggtcaagactacttccaaggtcagttcacctttttgtacttggttttacaaggtttgatctgtgggcttttcttgtccagtgacttgtttaacatttttattttcttagaagtagcgactgtagtagtttctgtcttaattatgatcaacaaagaaaaacaagccatttatgacgggatgatctacttctttgttaatgtcatcgggacaactttcttactcttaagtatcgggatcttgtaccagacctttggcttactggatgttcgctacttgcaaaaagccatgaccttggttgaagatccccggtccatgatcgtcccttttgccttgatgatggttacagtttccttaaagacagctgtttcacctctcttctcttggcttccaaaggcccacgggacacccagtgctccgccagttgtgtcagccttattgtccggtttatacataaagactggggtctacctttttatccggttttcagtcatgttccagcccgtcattgacatgtccgacttcttcttagtcattggttttatcacagctatcatcggctttaccatggcacttggccagcacgatatcaagttaatcttggcctaccacacggtttctcagattggcctcattatggtgggattaaacctgggacctgaaatatccttctggggtggggtcctccacattttcaaccacgccatctttaagtccaccttgttcttgacagccggagtgatttacgaggcatacggcacccgggatgtttacaagattaggggggtcatgaggaccatgcccatggtaggaattgccagcttgctttccattttagggattatgggggcaccgttctttaatgcttccatttccaaatacatgattatccatggaacggaagactatgtcattaccctacttctcaacttgattaacctgggtacgattatgtcctttgttaaatactcgaccatgctctttggggacaagttgaagaccagtttcgacaagcctaaacggtcagtccggttaactgttttggctttgggactagcttccttactaaccggagtgtttgcccggccgctaacagcctttttattaaactatgaatttacagttgaccttgctgagtacagtatgaaaacgattgtctttatctttatgtttattgctgcaattggcttctacaatggcaccatcaagcatgggggcattttggagcgaattggccatatcgagctaacctttaatgggatcatcactgctatggtcggctatctacttgttgttgttttctttggcaatttgatgatttaa

SEQ ID NO: 3754 - protein, 115 aa, Alloiococcus otitidis
MLFGDKLKTSFDKPKRSVRLTVLALGLASLLTGVFARPLTAFLLNYEFTVDLAEYSMKTIVFIFMFIAAIGFYNGTIKHGGILERIGHIELTFNGIITAMVGYLLVVVFFGNLMI

SEQ ID NO: 3755 - DNA, 1614 bp, Alloiococcus otitidis; identical to SEQ ID NO: 3753
  CDS (1081)..(1611)

SEQ ID NO: 3756 - protein, 177 aa, Alloiococcus otitidis
MRTMPMVGIASLLSILGIMGAPFFNASISKYMIIHGTEDYVITLLLNLINLGTIMSFVKYSTMLFGDKLKTSFDKPKRSVRLTVLALGLASLLTGVFARPLTAFLLNYEFTVDLAEYSMKTIVFIFMFIAAIGFYNGTIKHGGILERIGHIELTFNGIITAMVGYLLVVVFFGNLMI

SEQ ID NO: 3757 - DNA, 1614 bp, Alloiococcus otitidis; identical to SEQ ID NO: 3753
  CDS (568)..(1611)

SEQ ID NO: 3758 - protein, 348 aa, Alloiococcus otitidis
MQKAMTLVEDPRSMIVPFALMMVTVSLKTAVSPLFSWLPKAHGTPSAPPVVSALLSGLYIKTGVYLFIRFSVMFQPVIDMSDFFLVIGFITAIIGFTMALGQHDIKLILAYHTVSQIGLIMVGLNLGPEISFWGGVLHIFNHAIFKSTLFLTAGVIYEAYGTRDVYKIRGVMRTMPMVGIASLLSILGIMGAPFFNASISKYMIIHGTEDYVITLLLNLINLGTIMSFVKYSTMLFGDKLKTSFDKPKRSVRLTVLALGLASLLTGVFARPLTAFLLNYEFTVDLAEYSMKTIVFIFMFIAAIGFYNGTIKHGGILERIGHIELTFNGIITAMVGYLLVVVFFGNLMI

SEQ ID NO: 3759 - DNA, 1614 bp, Alloiococcus otitidis; identical to SEQ ID NO: 3753
  CDS (13)..(1611)

SEQ ID NO: 3760 - protein, 533 aa, Alloiococcus otitidis
MMPLYLFVLLPIVAGLVSYGLKGIIRNIFLLVFQFLFAGYAFYLFFTVSDQGSILWNSAGYQDGLALSLYADTLSTFLILITAVLFMFYLIYGSGQDYFQGQFTFLYLVLQGLICGLFLSSDLFNIFIFLEVATVVVSVLIMINKEKQAIYDGMIYFFVNVIGTTFLLLSIGILYQTFGLLDVRYLQKAMTLVEDPRSMIVPFALMMVTVSLKTAVSPLFSWLPKAHGTPSAPPVVSALLSGLYIKTGVYLFIRFSVMFQPVIDMSDFFLVIGFITAIIGFTMALGQHDIKLILAYHTVSQIGLIMVGLNLGPEISFWGGVLHIFNHAIFKSTLFLTAGVIYEAYGTRDVYKIRGVMRTMPMVGIASLLSILGIMGAPFFNASISKYMIIHGTEDYVITLLLNLINLGTIMSFVKYSTMLFGDKLKTSFDKPKRSVRLTVLALGLASLLTGVFARPLTAFLLNYEFTVDLAEYSMKTIVFIFMFIAAIGFYNGTIKHGGILERIGHIELTFNGIITAMVGYLLVVVFFGNLMI

SEQ ID NO: 3761 - DNA, 1632 bp, Alloiococcus otitidis
  CDS (1084)..(1629)
gtaaatctttgggggaggtctttggtgttattttatctcgttttgataccgatcttgttcggtgtcttaaatatattaattagcaagtgggatacccggatcccagtcttggttggacaggtcctcttattagcttataccttttacttgttctttttggttcgaagttccggggctattattgattttatgtctggcttgccagagggttttgccattcgtttatatgctgatattttgtcctcgaccatggtcttgttaaatgtcttgatttttaccgtactcttgttctttgcctataataaatcttatacgactgataaatttctctttcttgtttttgttttagaaggggttatgaacagtcttttcttgagtgctgacttgtttaacttgtttatcatgttagaagtttccaccctgactgtttctatcttaatcatgatcaagaaagagaagcaggccatttatgacggaatgatctacttttttgccaatgtcattgggaccacctttatgctgtttggaattggctttttatactccacaaccggtgttctagacatctatgtgattgctgacatgatggagtacatccaagatcctaacttggtccttttgccttatgctttgatgatgaccaccctcagtttgaagattgcggccgttccgcttttttcctggctccccaaggcccacgggaccccaagtgcaccgtcagtggtatcagccatcctgtccggtctctatattaaaacaggtgtttacctctttatccgcttctcctttatgtttggaccagtaattgatgcctccaacttatttatggtgatcggttttattacctcagtctttggcatcattatggctgtagcccaaactgacctcaagatgatcttggcctattcgaccgtgtcacaggtcggtttgatcatggttgggattaacttaggagcccaggtagccttcttcggagccctcttccatatattcagtcatgccttgttcaagtccaccctcttcttgtcagccgggcaaattgaagaccagtacggaacccgggacatccggcaaattaggggcttgtggaagaccatgcctttgacggccatttccattgtcttagctgcttttgggattatcggggcacctttctttaacggtagtgtgtctaagtatatgatggcatctggttcggatatgaccctctacagccttgccatgcacattattaatattggaaccattatttactttgtccgcttgatttccatcttatttggcgaagaggctaagatccgaaatccagaggctcatgccgttgacaaattatcggaatatacccttttattcctctctattgctatcttactgaccggtatcttctctccagtagtagtcgaagccctctttaactactccgacctaaccctcttgtccacttcttatctggaaaaaaatatattttttgtttttgaatttattgcaggctttgccctttaccaggggatcgtccggcgggaaactttgctggaagttatcaaggaatttgaaattacctttaacggcattatcacagccatggcttcattcttcctctttatctacgcttacggttttgtttttctctaa

SEQ ID NO: 3762 - protein, 182 aa, Alloiococcus otitidis
MWKTMPLTAISIVLAAFGIIGAPFFNGSVSKYMMASGSDMTLYSLAMHIINIGTIIYFVRLISILFGEEAKIRNPEAHAVDKLSEYTLLFLSIAILLTGIFSPVVVEALFNYSDLTLLSTSYLEKNIFFVFEFIAGFALYQGIVRRETLLEVIKEFEITFNGIITAMASFFLFIYAYGFVFL

SEQ ID NO: 3763 - DNA, 1632 bp, Alloiococcus otitidis; identical to SEQ ID NO: 3761
  CDS (790)..(1629)

SEQ ID NO: 3764 - protein, 280 aa, Alloiococcus otitidis
MFGPVIDASNLFMVIGFITSVFGIIMAVAQTDLKMILAYSTVSQVGLIMVGINLGAQVAFFGALFHIFSHALFKSTLFLSAGQIEDQYGTRDIRQIRGLWKTMPLTAISIVLAAFGIIGAPFFNGSVSKYMMASGSDMTLYSLAMHIINIGTIIYFVRLISILFGEEAKIRNPEAHAVDKLSEYTLLFLSIAILLTGIFSPVVVEALFNYSDLTLLSTSYLEKNIFFVFEFIAGFALYQGIVRRETLLEVIKEFEITFNGIITAMASFFLFIYAYGFVFL

SEQ ID NO: 3765 - DNA, 1632 bp, Alloiococcus otitidis; identical to SEQ ID NO: 3761
  CDS (637)..(1629)

SEQ ID NO: 3766 - protein, 331 aa, Alloiococcus otitidis
MTTLSLKIAAVPLFSWLPKAHGTPSAPSVVSAILSGLYIKTGVYLFIRFSFMFGPVIDASNLFMVIGFITSVFGIIMAVAQTDLKMILAYSTVSQVGLIMVGINLGAQVAFFGALFHIFSHALFKSTLFLSAGQIEDQYGTRDIRQIRGLWKTMPLTAISIVLAAFGIIGAPFFNGSVSKYMMASGSDMTLYSLAMHIINIGTIIYFVRLISILFGEEAKIRNPEAHAVDKLSEYTLLFLSIAILLTGIFSPVVVEALFNYSDLTLLSTSYLEKNIFFVFEFIAGFALYQGIVRRETLLEVIKEFEITFNGIITAMASFFLFIYAYGFVFL

SEQ ID NO: 3767 - DNA, 1632 bp, Alloiococcus otitidis; identical to SEQ ID NO: 3761
  CDS (190)..(1629)

SEQ ID NO: 3768 - protein, 480 aa, Alloiococcus otitidis
MSGLPEGFAIRLYADILSSTMVLLNVLIFTVLLFFAYNKSYTTDKFLFLVFVLEGVMNSLFLSADLFNLFIMLEVSTLTVSILIMIKKEKQAIYDGMIYFFANVIGTTFMLFGIGFLYSTTGVLDIYVIADMMEYIQDPNLVLLPYALMMTTLSLKIAAVPLFSWLPKAHGTPSAPSVVSAILSGLYIKTGVYLFIRFSFMFGPVIDASNLFMVIGFITSVFGIIMAVAQTDLKMILAYSTVSQVGLIMVGINLGAQVAFFGALFHIFSHALFKSTLFLSAGQIEDQYGTRDIRQIRGLWKTMPLTAISIVLAAFGIIGAPFFNGSVSKYMMASGSDMTLYSLAMHIINIGTIIYFVRLISILFGEEAKIRNPEAHAVDKLSEYTLLFLSIAILLTGIFSPVVVEALFNYSDLTLLSTSYLEKNIFFVFEFIAGFALYQGIVRRETLLEVIKEFEITFNGIITAMASFFLFIYAYGFVFL

SEQ ID NO: 3769 - DNA, 1632 bp, Alloiococcus otitidis; identical to SEQ ID NO: 3761
  CDS (25)..(1629)

SEQ ID NO: 3770 - protein, 535 aa, Alloiococcus otitidis
MLFYLVLIPILFGVLNILISKWDTRIPVLVGQVLLLAYTFYLFFLVRSSGAIIDFMSGLPEGFAIRLYADILSSTMVLLNVLIFTVLLFFAYNKSYTTDKFLFLVFVLEGVMNSLFLSADLFNLFIMLEVSTLTVSILIMIKKEKQAIYDGMIYFFANVIGTTFMLFGIGFLYSTTGVLDIYVIADMMEYIQDPNLVLLPYALMMTTLSLKIAAVPLFSWLPKAHGTPSAPSVVSAILSGLYIKTGVYLFIRFSFMFGPVIDASNLFMVIGFITSVFGIIMAVAQTDLKMILAYSTVSQVGLIMVGINLGAQVAFFGALFHIFSHALFKSTLFLSAGQIEDQYGTRDIRQIRGLWKTMPLTAISIVLAAFGIIGAPFFNGSVSKYMMASGSDMTLYSLAMHIINIGTIIYFVRLISILFGEEAKIRNPEAHAVDKLSEYTLLFLSIAILLTGIFSPVVVEALFNYSDLTLLSTSYLEKNIFFVFEFIAGFALYQGIVRRETLLEVIKEFEITFNGIITAMASFFLFIYAYGFVFL

SEQ ID NO: 3771 - DNA, 1632 bp, Alloiococcus otitidis; identical to SEQ ID NO: 3761
  CDS (22)..(1629)

SEQ ID NO: 3772 - protein, 536 aa, Alloiococcus otitidis
MVLFYLVLIPILFGVLNILISKWDTRIPVLVGQVLLLAYTFYLFFLVRSSGAIIDFMSGLPEGFAIRLYADILSSTMVLLNVLIFTVLLFFAYNKSYTTDKFLFLVFVLEGVMNSLFLSADLFNLFIMLEVSTLTVSILIMIKKEKQAIYDGMIYFFANVIGTTFMLFGIGFLYSTTGVLDIYVIADMMEYIQDPNLVLLPYALMMTTLSLKIAAVPLFSWLPKAHGTPSAPSVVSAILSGLYIKTGVYLFIRFSFMFGPVIDASNLFMVIGFITSVFGIIMAVAQTDLKMILAYSTVSQVGLIMVGINLGAQVAFFGALFHIFSHALFKSTLFLSAGQIEDQYGTRDIRQIRGLWKTMPLTAISIVLAAFGIIGAPFFNGSVSKYMMASGSDMTLYSLAMHIINIGTIIYFVRLISILFGEEAKIRNPEAHAVDKLSEYTLLFLSIAILLTGIFSPVVVEALFNYSDLTLLSTSYLEKNIFFVFEFIAGFALYQGIVRRETLLEVIKEFEITFNGIITAMASFFLFIYAYGFVFL

SEQ ID NO: 3773 - DNA, 468 bp, Alloiococcus otitidis
  CDS (34)..(465)
aatgaaacacgtgcaattaaaggattgatctatatggataaattactggaggactccattaataaattaaaagaacataatgtccgcattacccctcagcgttacgctattttagagtatttaaccaccacagctgaccacccgacagctgatgatatctaccagaacttggttgatgattttccgaatatgagtgtagcgactgtttacaataacttgcggcttttgacccagatgcatttggtcaatgagttaaaatatggggatacttccagtcgttttgacttttcctcccacaaccactaccacgctatttgctcagtttgtggcaagattaaggatatttattatccaggcttagacgatgtggaagaagcgaccgaaagcctgactggttacgatgtggatacccaccgcttagaaatctacggagtctgccctgagtgccaggccaaaagacaagactaa

SEQ ID NO: 3774 - protein, 144 aa, Alloiococcus otitidis
MDKLLEDSINKLKEHNVRITPQRYAILEYLTTTADHPTADDIYQNLVDDFPNMSVATVYNNLRLLTQMHLVNELKYGDTSSRFDFSSHNHYHAICSVCGKIKDIYYPGLDDVEEATESLTGYDVDTHRLEIYGVCPECQAKRQD

SEQ ID NO: 3775 - DNA, 468 bp, Alloiococcus otitidis; identical to SEQ ID NO: 3773
  CDS (25)..(465)

SEQ ID NO: 3776 - protein, 147 aa, Alloiococcus otitidis
MIYMDKLLEDSINKLKEHNVRITPQRYAILEYLTTTADHPTADDIYQNLVDDFPNMSVATVYNNLRLLTQMHLVNELKYGDTSSRFDFSSHNHYHAICSVCGKIKDIYYPGLDDVEEATESLTGYDVDTHRLEIYGVCPECQAKRQD

SEQ ID NO: 3777 - DNA, 957 bp, Alloiococcus otitidis
  CDS (28)..(954)
aaaaatatgacgaaggagtcttcatttatggtcaagaccaaaatatgttctattttaaatataacaccggattcattttctgatggtgggcgcaactatcaggcagaccaagccatagctcacggactcgacttggtagacaagggagcggacatgttggatattggaggtgagtcgacccggcctggttccagtccagtcgacctccaagatgaaatcgaccgtattgtaccggtgatcaagggaatcagagaaaaaagtcaggttcctatttcagtagatacctaccgggctccagttgccaaagcggctattgatgctggggcggatatcatcaatgatattaccggtctaactggtgatgtagacatggccgacttgctagctcaagaaggggttaaggccattgtcatgttcaacccggttattgctcgacctgaccacccatcttcccaaaaattcagagatttcgggggccgagattttttcaccgatgaagaaagagataaaatgtcccaagcacccattgaagaggccatgatggtctactttgacaaagtcttgaacaaggcccatcaagctgggattgaccgggataagattttactggacccgggaattggctttggcctgaccaagaaggaaaattacaagttgattcacagtgttgcctcgattcatgacaagggctacccggtctttttaggagtttcccgcaaacgcttcttggtgggggaagtctccaagctaggcatcgaagccgacccagagacccaagcaggatttttaaaccgagacctggcttcagctattattacagcttacgctagccatataggggtagactatgtccgggttcattccttagatgaacacaaaatagcaaccaccattacccataatattttaaacagcgatagcttagatgatcagagctttgaccaatataaaaattaa

SEQ ID NO: 3778 - protein, 309 aa, Alloiococcus otitidis
MVKTKICSILNITPDSFSDGGRNYQADQAIAHGLDLVDKGADMLDIGGESTRPGSSPVDLQDEIDRIVPVIKGIREKSQVPISVDTYRAPVAKAAIDAGADIINDITGLTGDVDMADLLAQEGVKAIVMFNPVIARPDHPSSQKFRDFGGRDFFTDEERDKMSQAPIEEAMMVYFDKVLNKAHQAGIDRDKILLDPGIGFGLTKKENYKLIHSVASIHDKGYPVFLGVSRKRFLVGEVSKLGIEADPETQAGFLNRDLASAIITAYASHIGVDYVRVHSLDEHKIATTITHNILNSDSLDDQSFDQYKN

SEQ ID NO: 3779 - DNA, 957 bp, Alloiococcus otitidis; identical to SEQ ID NO: 3777
  CDS (7)..(954)

SEQ ID NO: 3780 - protein, 316 aa, Alloiococcus otitidis
MTKESSFMVKTKICSILNITPDSFSDGGRNYQADQAIAHGLDLVDKGADMLDIGGESTRPGSSPVDLQDEIDRIVPVIKGIREKSQVPISVDTYRAPVAKAAIDAGADIINDITGLTGDVDMADLLAQEGVKAIVMFNPVIARPDHPSSQKFRDFGGRDFFTDEERDKMSQAPIEEAMMVYFDKVLNKAHQAGIDRDKILLDPGIGFGLTKKENYKLIHSVASIHDKGYPVFLGVSRKRFLVGEVSKLGIEADPETQAGFLNRDLASAIITAYASHIGVDYVRVHSLDEHKIATTITHNILNSDSLDDQSFDQYKN

SEQ ID NO: 3781 - DNA, 360 bp, Alloiococcus otitidis
  CDS (79)..(357)
atacatgtcaatactagggaggaatttttaagtcagatggataagagacggagtaaaatattactagttttggggatcgtgatcttgcttttcagcctctatgtcctttcttttgatccttttgtcgcttttgtcggaattgctgtggccttggtctctttattcaatgcctaccaggcccacaagggaattaagccaaaatttatccgtaaccatgaggaaaaagaagaggaaaaactcaaggaagaaagagagcaaaacaccttctataaccggcaaagacagcgaaacctagagaaaagacaagaacaagccaaaaaacaagaagaaagggagaaagaagataagtttaacctctaa

SEQ ID NO: 3782 - protein, 93 aa, Alloiococcus otitidis
MILLFSLYVLSFDPFVAFVGIAVALVSLFNAYQAHKGIKPKFIRNHEEKEEEKLKEEREQNTFYNRQRQRNLEKRQEQAKKQEEREKEDKFNL

SEQ ID NO: 3783 - DNA, 360 bp, Alloiococcus otitidis; identical to SEQ ID NO: 3781
  CDS (37)..(357)

SEQ ID NO: 3784 - protein, 107 aa, Alloiococcus otitidis
MDKRRSKILLVLGIVILLFSLYVLSFDPFVAFVGIAVALVSLFNAYQAHKGIKPKFIRNHEEKEEEKLKEEREQNTFYNRQRQRNLEKRQEQAKKQEEREKEDKFNL

SEQ ID NO: 3785 - DNA, 375 bp, Alloiococcus otitidis
  CDS (4)..(372)
ctgatgcttgcagcggtttttcgaaactataactcgtttattgggctaagattgttgcgttattgcctcataactcctttattgctctccgattgtcgcgttattgccccagaactcctttattgctctccgattgtcgcgttattgcctcataactcctttattgctctccgattgtcgcgttattgccccagaactcctttattgctctccgattgtcgcgttattgcctcagaactcctttattgctcttcaattgtcgcgttattgcctcataactcctttattgctcttcaattgtcgcgttattgccccataactcgtttattgggttgcgatcaaaataacatatcgctgcctatttgtctccattaa

SEQ ID NO: 3786 - protein, 123 aa, Alloiococcus otitidis
MLAAVFRNYNSFIGLRLLRYCLITPLLLSDCRVIAPELLYCSPIVALLPHNSFIALRLSRYCPRTPLLLSDCRVIASELLYCSSIVALLPHNSFIALQLSRYCPITRLLGCDQNNISLPICLH

SEQ ID NO: 3787 - DNA, 654 bp, Alloiococcus otitidis
  CDS (238)..(651)
ctgaagattccgacaagccagattgggaaaaacccgattcagtcaaggaagtcgaagtcatcaacgggtctaacccagccaaagaggcgacagcttctacacctgaatctcaaaaaatcaccgaattatttgtcgaaggccacttaccttctgatgaacaaccccaaagacaagcaccaagccaaggtcaagaagaaactgaccaagaagaaaacgaccaggctactgaccaaacagatgagaccgaaggaagtccaagaagagccagaccaagctcaaccagaagaagagcctgagccagagcccgaaccggaaccagaaactgagcctgagccgcaaccggaccaaggccaagaagaaccagaccaaaacgatcccgatgatggtcaaggtcaagagggacaggacggccaagacggtcaagaaaaccaagaaggccagaatggtcagggccgtcagccaggccaggaaggtcaagaaagacctagaccccaaccagatcaaggtggccaagaaagaccgggtaatggtggcggtcaagaagaaggccaaaaccaagaaagagcacgccgggctagagaattattccggcaactcatcccgcgtaatgacgacgaaaatgctagcgaagaagaccggacagacggccagtag

SEQ ID NO: 3788 - protein, 138 aa, Alloiococcus otitidis
MRPKEVQEEPDQAQPEEEPEPEPEPEPETEPEPQPDQGQEEPDQNDPDDGQGQEGQDGQDGQENQEGQNGQGRQPGQEGQERPRPQPDQGGQERPGNGGGQEEGQNQERARRARELFRQLIPRNDDENASEEDRTDGQ

SEQ ID NO: 3789 - DNA, 654 bp, Alloiococcus otitidis; identical to SEQ ID NO: 3787
  CDS (154)..(651)

SEQ ID NO: 3790 - protein, 166 aa, Alloiococcus otitidis
MNNPKDKHQAKVKKKLTKKKTTRLLTKQMRPKEVQEEPDQAQPEEEPEPEPEPEPETEPEPQPDQGQEEPDQNDPDDGQGQEGQDGQDGQENQEGQNGQGRQPGQEGQERPRPQPDQGGQERPGNGGGQEEGQNQERARRARELFRQLIPRNDDENASEEDRTDGQ

SEQ ID NO: 3791 - DNA, 654 bp, Alloiococcus otitidis; identical to SEQ ID NO: 3787
  CDS (130)..(651)

SEQ ID NO: 3792 - protein, 174 aa, Alloiococcus otitidis
MSKATYLLMNNPKDKHQAKVKKKLTKKKTTRLLTKQMRPKEVQEEPDQAQPEEEPEPEPEPEPETEPEPQPDQGQEEPDQNDPDDGQGQEGQDGQDGQENQEGQNGQGRQPGQEGQERPRPQPDQGGQERPGNGGGQEEGQNQERARRARELFRQLIPRNDDENASEEDRTDGQ

SEQ ID NO: 3793 - DNA, 2283 bp, Alloiococcus otitidis
  CDS (145)..(2280)
atcgaattgatgaataaacacaaggagaatgttatgagcgacaacaacaaaacgactcgcagtagtcaatatcaaaataaacccaaccggaaaaagaataaaagcaagggtaaagggataaactgggctggcattgccaaaaaagtgggcctagtgattgtcttctttatcctcttggttttcatctcaggagcgggactcttcacctactatgcttcttctgcacctgacttaacagatgatgccttgtttggtacctatacttcagaacttttggaccgggacggtgaagtttattataccatcggagctgacagccgagaattcgccaaccctgatgaataccctgaaatactgaaagaagccgttctgtccattgaagaccaacgcttttacaagcacccaggggttgacccaattgggattgcccgggctggtattggttatgtgacggaaggagaagttgttgggggtggatcaaccattacccagcaactgatcaagctttctcttttttcaacatccaaagaggaccaaactatcaaaagaaagtcgcaagaggcttggctggccctccaacttgagcgacgtttgtccaaagaacaaattttaaccctctacctcaaccgagtccacatggctggcaatgtttacggtatgaaaacagcagccgaacaatactatggcaaagaagtaggagacttggaactccatgaagcagccatgctagccggtatgcccaaagcccccaactactttaatccctataaaaaccctgaccaggctaaaaaccggcgcaacactgttttgtatgccatgtatgaagaaggctatattagccaggacgaatatgaccaagcttctgacctcccagctgaccaagacttggtcgaccaaccggaagagttagatgatgcagaactttaccttgacggctatattacagctgtcctagacgaaattgctgaaaaaaccgactatgacccctatacagctggcctaaaaatccacaccaatattgatttagacagccaagaattcatgtacaacctggcccataatgaggactatattgctagcgacgacgagctccaaactgccatgaccctgattgatccaaccacaggggaactcctagcaatcatgggaggccgcaatattgaaggccacttgtccctcaaccggtctaccgaaaatacacgtaatatagggtctaccatcaagcccttaaccgtttacgctccagccatcgagtttaaccaacgctccacttatgaacaagtggtcgatgagccttacacagttcctggaacagattggtctcctagaaactgggaccgagagttccatggccaaatgtccacccgggatgccctggtcaactcacgtaatattccaaccgctaaaatttttaacgaagaattggactttgaccaagtttcagaatttcttgaaagactagatatcaaccctgaaagcttagctagctcagaaggcttggtaccaagttcggccattgatggatcgatgaccccccttcaattaactggagccttctctgcctttgctaatggtggacagtatatccaaccccatactgtctccgaaattgtcacccaggacggggagaccattgacaccacacccgaaccggtccaagccatggaagactacaccgcttatatgatcaccgacatgctcaagggggtcattgacctcttcagtaatgacctagacatttctgacctcccccaagctggaaaaacgggtacttccaactactccagtgaccaacatgaagagtacaacatcccaactgaccaaggtctcgttcctgactcctggtttgtcggctacactcctgagtacaccctatccgtttgggtgggttacgacaaacacttggaagagggtaaccagctcagcaatgctgacggaacccggcaactgccaagacgtttttaccgggaaattatgacccggttaactgaagattccgacaagccagattgggaaaaacccgattcagtcaaggaagtcgaagtcatcaacgggtctaacccagccaaagaggcgacagcttctacacctgaatctcaaaaaatcaccgaattatttgtcgaaggccacttaccttctgatgaacaaccccaaagacaagcaccaagccaaggtcaagaagaaactgaccaagaagaaaacgaccaggctactgaccaaacagatgagaccgaaggaagtccaagaagagccagaccaagctcaaccagaagaagagcctga

SEQ ID NO: 3794 - protein, 712 aa, Alloiococcus otitidis
MGLVIVFFILLVFISGAGLFTYYASSAPDLTDDALFGTYTSELLDRDGEVYYTIGADSREFANPDEYPEILKEAVLSIEDQRFYKHPGVDPIGIARAGIGYVTEGEVVGGGSTITQQLIKLSLFSTSKEDQTIKRKSQEAWLALQLERRLSKEQILTLYLNRVHMAGNVYGMKTAAEQYYGKEVGDLELHEAAMLAGMPKAPNYFNPYKNPDQAKNRRNTVLYAMYEEGYISQDEYDQASDLPADQDLVDQPEELDDAELYLDGYITAVLDEIAEKTDYDPYTAGLKIHTNIDLDSQEFMYNLAHNEDYIASDDELQTAMTLIDPTTGELLAIMGGRNIEGHLSLNRSTENTRNIGSTIKPLTVYAPAIEFNQRSTYEQVVDEPYTVPGTDWSPRNWDREFHGQMSTRDALVNSRNIPTAKIFNEELDFDQVSEFLERLDINPESLASSEGLVPSSAIDGSMTPLQLTGAFSAFANGGQYIQPHTVSEIVTQDGETIDTTPEPVQAMEDYTAYMITDMLKGVIDLFSNDLDISDLPQAGKTGTSNYSSDQHEEYNIPTDQGLVPDSWFVGYTPEYTLSVWVGYDKHLEEGNQLSNADGTRQLPRRFYREIMTRLTEDSDKPDWEKPDSVKEVEVINGSNPAKEATASTPESQKITELFVEGHLPSDEQPQRQAPSQGQEETDQEENDQATDQTDETEGSPRRARPSSTRRRA

SEQ ID NO: 3795 - DNA, 2283 bp, Alloiococcus otitidis; identical to SEQ ID NO: 3793
  CDS (10)..(2280)

SEQ ID NO: 3796 - protein, 757 aa, Alloiococcus otitidis
MNKHKENVMSDNNKTTRSSQYQNKPNRKKNKSKGKGINWAGIAKKVGLVIVFFILLVFISGAGLFTYYASSAPDLTDDALFGTYTSELLDRDGEVYYTIGADSREFANPDEYPEILKEAVLSIEDQRFYKHPGVDPIGIARAGIGYVTEGEVVGGGSTITQQLIKLSLFSTSKEDQTIKRKSQEAWLALQLERRLSKEQILTLYLNRVHMAGNVYGMKTAAEQYYGKEVGDLELHEAAMLAGMPKAPNYFNPYKNPDQAKNRRNTVLYAMYEEGYISQDEYDQASDLPADQDLVDQPEELDDAELYLDGYITAVLDEIAEKTDYDPYTAGLKIHTNIDLDSQEFMYNLAHNEDYIASDDELQTAMTLIDPTTGELLAIMGGRNIEGHLSLNRSTENTRNIGSTIKPLTVYAPAIEFNQRSTYEQVVDEPYTVPGTDWSPRNWDREFHGQMSTRDALVNSRNIPTAKIFNEELDFDQVSEFLERLDINPESLASSEGLVPSSAIDGSMTPLQLTGAFSAFANGGQYIQPHTVSEIVTQDGETIDTTPEPVQAMEDYTAYMITDMLKGVIDLFSNDLDISDLPQAGKTGTSNYSSDQHEEYNIPTDQGLVPDSWFVGYTPEYTLSVWVGYDKHLEEGNQLSNADGTRQLPRRFYREIMTRLTEDSDKPDWEKPDSVKEVEVINGSNPAKEATASTPESQKITELFVEGHLPSDEQPQRQAPSQGQEETDQEENDQATDQTDETEGSPRRARPSSTRRRA

SEQ ID NO: 3797 - DNA, 2283 bp, Alloiococcus otitidis; identical to SEQ ID NO: 3793
  CDS (7)..(2280)

SEQ ID NO: 3798 - protein, 758 aa, Alloiococcus otitidis
MMNKHKENVMSDNNKTTRSSQYQNKPNRKKNKSKGKGINWAGIAKKVGLVIVFFILLVFISGAGLFTYYASSAPDLTDDALFGTYTSELLDRDGEVYYTIGADSREFANPDEYPEILKEAVLSIEDQRFYKHPGVDPIGIARAGIGYVTEGEVVGGGSTITQQLIKLSLFSTSKEDQTIKRKSQEAWLALQLERRLSKEQILTLYLNRVHMAGNVYGMKTAAEQYYGKEVGDLELHEAAMLAGMPKAPNYFNPYKNPDQAKNRRNTVLYAMYEEGYISQDEYDQASDLPADQDLVDQPEELDDAELYLDGYITAVLDEIAEKTDYDPYTAGLKIHTNIDLDSQEFMYNLAHNEDYIASDDELQTAMTLIDPTTGELLAIMGGRNIEGHLSLNRSTENTRNIGSTIKPLTVYAPAIEFNQRSTYEQVVDEPYTVPGTDWSPRNWDREFHGQMSTRDALVNSRNIPTAKIFNEELDFDQVSEFLERLDINPESLASSEGLVPSSAIDGSMTPLQLTGAFSAFANGGQYIQPHTVSEIVTQDGETIDTTPEPVQAMEDYTAYMITDMLKGVIDLFSNDLDISDLPQAGKTGTSNYSSDQHEEYNIPTDQGLVPDSWFVGYTPEYTLSVWVGYDKHLEEGNQLSNADGTRQLPRRFYREIMTRLTEDSDKPDWEKPDSVKEVEVINGSNPAKEATASTPESQKITELFVEGHLPSDEQPQRQAPSQGQEETDQEENDQATDQTDETEGSPRRARPSSTRRRA

SEQ ID NO: 3799 - DNA, 360 bp, Alloiococcus otitidis
  CDS (70)..(357)
ttctctagcccggcgtgctctttcttggttttggccttcttcttgaccgccaccattacccggtctttcttggccaccttgatctggttggggtctaggtctttcttgaccttcctggcctggctgacggccctgaccattctggccttcttggttttcttgaccgtcttggccgtcctgtccctcttgaccttgaccatcatcgggatcgttttggtctggttcttcttggccttggtccggttgcggctcaggctcagtttctggttccggttcgggctctggctcaggctcttcttctggttgagcttggtctggctcttcttggacttccttcggtctcatctgtttggtcagtag

SEQ ID NO: 3800 - protein, 96 aa, Alloiococcus otitidis
MATLIWLGSRSFLTFLAWLTALTILAFLVFLTVLAVLSLLTLTIIGIVLVWFFLALVRLRLRLSFWFRFGLWLRLFFWLSLVWLFLDFLRSHLFGQ

SEQ ID NO: 3801 - DNA, 663 bp, Alloiococcus otitidis
  CDS (160)..(660)
tttatcttattttataggagtagtaaaatggttattcgctatcctaatggtcaaatctatcgtgaaccggaaagtcccaaatcaaaaaataagctgacaggatccaagaccgatccaatccagaagttacaaaaacgacgcaaccactccaaccgtggcatgaaactggaagagttgatcaactcttctattgaatactaccgccagcaggagattgctgtgatccataaaaagcccacccccgttcaaattgtcaatgttgactaccccaaacgctcagctgcgaaaatcaccgaagcctactttagacgggcttcaaccactgactacaatggggtttacaagggccactacctggactttgaagctaaagagaccaagtacaacacctcttttcccctgcaaaattttcacgaccaccaaatcaaccacatgcaggcttgtgagcggcaagggggcattgtctttgtcattatctatttttcaactttaaaccggtgtttcctcttagagggcaaggacttgtttaatacttgggttacttaccaaaggggcggtcggaaatccatccctttccagacggttgaagacaaaggacatgaaattgaattttcctaccaacctaccgtcccctttatagacattgtcgacaaattactttaa

SEQ ID NO: 3802 - protein, 167 aa, Alloiococcus otitidis
MKLEELINSSIEYYRQQEIAVIHKKPTPVQIVNVDYPKRSAAKITEAYFRRASTTDYNGVYKGHYLDFEAKETKYNTSFPLQNFHDHQINHMQACERQGGIVFVIIYFSTLNRCFLLEGKDLFNTWVTYQRGGRKSIPFQTVEDKGHEIEFSYQPTVPFIDIVDKLL

SEQ ID NO: 3803 - DNA, 663 bp, Alloiococcus otitidis; identical to SEQ ID NO: 3801
  CDS (28)..(660)

SEQ ID NO: 3804 - protein, 211 aa, Alloiococcus otitidis
MVIRYPNGQIYREPESPKSKNKLTGSKTDPIQKLQKRRNHSNRGMKLEELINSSIEYYRQQEIAVIHKKPTPVQIVNVDYPKRSAAKITEAYFRRASTTDYNGVYKGHYLDFEAKETKYNTSFPLQNFHDHQINHMQACERQGGIVFVIIYFSTLNRCFLLEGKDLFNTWVTYQRGGRKSIPFQTVEDKGHEIEFSYQPTVPFIDIVDKLL

SEQ ID NO: 3805 - DNA, 621 bp, Alloiococcus otitidis
  CDS (64)..(618)
actaattgtgacaggtctattttaccaaattataagccatttaaaaagaagggaaggactctgatgcgacgactctatgtgagtggctaccggtcttatgaattgggtattttcgacaaaaaagacaaaagacttttttatcttaaggaattcttaaaagaagaatttcgccggtatgctgactcgggattggaatgggtgatcacatccggtaatttaggcattgagctttgggcaggattggccctcatcgatttaaaagaagagctatcccaattaaacttggctctcttactgccttataaaggctttggaaataattggaatgatgacaaccgcaagctcttaaccaaggtggtggaaggggcggactatgtcaatttgacttcccaggatgaatacaagcatgggggccagctaaaggggaacgcccaatttatcttaaataactcagatggcctcttattagtctacgaccccgataaaaaaggcaagccagccttcttgtacgaccaggctagagcctacagccaggcgaagggctacccagtccacaccattaattttgaagaactgcaggaattcgtcatcgactaccaggaaatacataatgtcaagtaa

SEQ ID NO: 3806 - protein, 185 aa, Alloiococcus otitidis
MRRLYVSGYRSYELGIFDKKDKRLFYLKEFLKEEFRRYADSGLEWVITSGNLGIELWAGLALIDLKEELSQLNLALLLPYKGFGNNWNDDNRKLLTKVVEGADYVNLTSQDEYKHGGQLKGNAQFILNNSDGLLLVYDPDKKGKPAFLYDQARAYSQAKGYPVHTINFEELQEFVIDYQEIHNVK

SEQ ID NO: 3807 - DNA, 279 bp, Alloiococcus otitidis
  CDS (49)..(276)
ccttggtcctcttggctgccctttcttcgacccccgagaactgggctcatggttgggctttttcgcttggcaacccgtgtgtcctggtcttctgcgggtggcaggtccaccttcttcgttgcttgtgggtccgaagcagctccctctgagtccgccttgccctttgtatcttggctttcttgtagtttagattggctactttctgcttttggactagacttatcttgcttcgactcttggtcttcagaagttttactatcgtcttcgccctcagcttga

SEQ ID NO: 3808 - protein, 76 aa, Alloiococcus otitidis
MVGLFRLATRVSWSSAGGRSTFFVACGSEAAPSESALPFVSWLSCSLDWLLSAFGLDLSCFDSWSSEVLLSSSPSA

SEQ ID NO: 3809 - DNA, 711 bp, Alloiococcus otitidis
  CDS (13)..(708)
gaggtgcaagcaatggtcaaaacagaattaacccaacgacaaatcttagagaaagatttttcatctaaattaagaggctatgacccgcaggaagtggatgaatttttagatgtcataatccgggactacaaggcttttgatgaccaggtcagtgacttagagaaccaagtcagcaagttaaaagatgagaaccaacgcttgacccaaaaaaccagcaaggtcttcaaacgctttgaagccattgtccagcaaaatgaaatcttgaaaaaccagttagctgaatacgaagaaaaaatgcgacaaggaagttctcaagctgagggcgaagacgatagtaaaacttctgaagaccaagagtcgaagcaagataagtctagtccaaaagcagaaagtagccaatctaaactacaagaaagccaagatacaaagggcaaggcggactcagagggagctgcttcggacccacaagcaacgaagaaggtggacctgccacccgcagaagaccaggacacacgggttgccaagcgaaaaagcccaaccatgagcccagttctcgggggtcgaagaaagggcagccaagaggaccaaggtcaaaaagcaagccggccgtcagctaccattatcgatattttgaaacgactttctaacctagagcgggctgtttttggagaagaaaattttaaaccaaaaaatggtgaccaagcagaataa

SEQ ID NO: 3810 - protein, 232 aa, Alloiococcus otitidis
MVKTELTQRQILEKDFSSKLRGYDPQEVDEFLDVIIRDYKAFDDQVSDLENQVSKLKDENQRLTQKTSKVFKRFEAIVQQNEILKNQLAEYEEKMRQGSSQAEGEDDSKTSEDQESKQDKSSPKAESSQSKLQESQDTKGKADSEGAASDPQATKKVDLPPAEDQDTRVAKRKSPTMSPVLGGRRKGSQEDQGQKASRPSATIIDILKRLSNLERAVFGEENFKPKNGDQAE

SEQ ID NO: 3811 - DNA, 711 bp, Alloiococcus otitidis; identical to SEQ ID NO: 3809
  CDS (4)..(708)

SEQ ID NO: 3812 - protein, 235 aa, Alloiococcus otitidis
MQAMVKTELTQRQILEKDFSSKLRGYDPQEVDEFLDVIIRDYKAFDDQVSDLENQVSKLKDENQRLTQKTSKVFKRFEAIVQQNEILKNQLAEYEEKMRQGSSQAEGEDDSKTSEDQESKQDKSSPKAESSQSKLQESQDTKGKADSEGAASDPQATKKVDLPPAEDQDTRVAKRKSPTMSPVLGGRRKGSQEDQGQKASRPSATIIDILKRLSNLERAVFGEENFKPKNGDQAE

SEQ ID NO: 3813 - DNA, 468 bp, Alloiococcus otitidis
  CDS (22)..(465)
agaaaggatagccaggtagaaatgcttgaatttattattatattgttgatcctcttaggtgtcttccagggggctaccactgcctttagcctgaaagatgaccagaagaaacaagcccaggatataaaagaggtcactgaatccttgaaatttatgggcatgactcagctagaagaccagaaaaagctagccatgcgtttttttaaaatctccacagcctatacccttttattttcgattccggccttgtggttcttgtggtttcaatcttcaatactagggattttagccagtggtctcttgttggttttagacctggtcaaaatttttggccaatacagggaaataaaaagagccaagtccctccaaaccatcctgaccacacccttagctagtaaggtattacattttgtcagaattgtagtcaaagctgttgtgattgccctcttactcggaaaggttgtgtaa

SEQ ID NO: 3814 - protein, 148 aa, Alloiococcus otitidis
MLEFIIILLILLGVFQGATTAFSLKDDQKKQAQDIKEVTESLKFMGMTQLEDQKKLAMRFFKISTAYTLLFSIPALWFLWFQSSILGILASGLLLVLDLVKIFGQYREIKRAKSLQTILTTPLASKVLHFVRIVVKAVVIALLLGKVV

SEQ ID NO: 3815 - DNA, 279 bp, Alloiococcus otitidis
  CDS (13)..(276)
agattattgtcggtgaatttgaggctaaggatttcgacagtctctttgaccaaaccaaggccttggcttgggaccgctttatccctcttgatggggcttttccggtttcaggtaagtctcaaaagtccaagcttcacagtgtcccagatgtccaacgtattgtcaacaaggccattgcctccaaactccaggaagtttaccataaaaggggccggatgccagaaactggtgccaagtatcccattgaagtggccctcaataaagaccaggtcctcttaa

SEQ ID NO: 3816 - protein, 88 aa, Alloiococcus otitidis
MNLRLRISTVSLTKPRPWLGTALSLLMGLFRFQVSLKSPSFTVSQMSNVLSTRPLPPNSRKFTIKGAGCQKLVPSIPLKWPSIKTRSS

SEQ ID NO: 3817 - DNA, 279 bp, Alloiococcus otitidis; identical to SEQ ID NO: 3815
  CDS (7)..(276)

SEQ ID NO: 3818 - protein, 90 aa, Alloiococcus otitidis
MSVNLRLRISTVSLTKPRPWLGTALSLLMGLFRFQVSLKSPSFTVSQMSNVLSTRPLPPNSRKFTIKGAGCQKLVPSIPLKWPSIKTRSS

SEQ ID NO: 3819 - DNA, 1140 bp, Alloiococcus otitidis
  CDS (4)..(1137)
aatatgacagactaccagttgcttgccacatgtgccagtggggtggaaggtctggttggggatgagctccgggatttgggctatgaagttcaagtcgaaaacggccgggtccgctaccagggcggtgaaaaagatattgcccaaaccaacctctggcttcggattgccgaccgggtaaagattattgtcggtgaatttgaggctaaggatttcgacagtctctttgaccaaaccaaggccttggcttgggaccgctttatccctcttgatggggcttttccggtttcaggtaagtctcaaaagtccaagcttcacagtgtcccagatgtccaacgtattgtcaacaaggccattgcctccaaactccaggaagtttaccataaaaggggccggatgccagaaactggtgccaagtatcccattgaagtggccctcaataaagaccaggtcctcttaaccttggatacgactggtgacagtctctttaagcggggctaccggacgggcaagggacctgcacccttaaaagaaaatctggcggcagccttgattaaactgaccacctggttccccgacaaaccctttgtggacccaacttgtggctctggaaccctaccgattgaagccgccttgatcggccataatatcgcaccaggctttaaccggtcctttctttgtgaaaactggccaagtatgccccaagaactctgggaaaaagttcgtttggaagctgaccaggctgctaattatgatattgacctggacatagctggttacgatattgaccatcgcatggtcgaaattgcccaggaaaacgccatggaagccggtctttaccacagtatttccttcaagcagatgcaggtagctgacttcacgaccgacaaaaaatttggcattatgatttccaatcccccttacggcgagcggttaggggacaaggaaaaagccaaccaactttaccgggagatgggccaggcctttagaccccatgaaacgtggagcaagtatattattaccagtgacttagattttgaagactactacggcgaaaaagccaccaagaaacggaaactctacaatggggcaatccggactgattatttccaattttggggtaagcgaacagaagatgactaa

SEQ ID NO: 3820 - protein, 378 aa, Alloiococcus otitidis
MTDYQLLATCASGVEGLVGDELRDLGYEVQVENGRVRYQGGEKDIAQTNLWLRIADRVKIIVGEFEAKDFDSLFDQTKALAWDRFIPLDGAFPVSGKSQKSKLHSVPDVQRIVNKAIASKLQEVYHKRGRMPETGAKYPIEVALNKDQVLLTLDTTGDSLFKRGYRTGKGPAPLKENLAAALIKLTTWFPDKPFVDPTCGSGTLPIEAALIGHNIAPGFNRSFLCENWPSMPQELWEKVRLEADQAANYDIDLDIAGYDIDHRMVEIAQENAMEAGLYHSISFKQMQVADFTTDKKFGIMISNPPYGERLGDKEKANQLYREMGQAFRPHETWSKYIITSDLDFEDYYGEKATKKRKLYNGAIRTDYFQFWGKRTEDD

SEQ ID NO: 3821 - DNA, 927 bp, Alloiococcus otitidis
  CDS (295)..(924)
tctagctcaccgatcgttacttggccgattagccagagttcaagccagatagaaaggattcgaccaatgtcaaacaaagagcaaagtaaaaagaaagacgttaatcaagaaggcgggcaagggacaagacaagtaggctttactggccctaatgtttcggacaagccttcttggtccccgttctttgtctacatagccattcttttgctggcctttagcttatttttccctagtctttaccgagagtctcaacgaattatcgacctagcaggggtagaagacttgtcagcttttatggcctctctcttgaccgttatccaacccttctttttagcggtcttagcccttttagctggtcacttttttacctaccgtctaggcttaggatctgtggtttatgactactttgactcccagaaagtggcgaaggcaaagcttaaggttagcctccaaccagccttggccttgggtttactttatggcctgatgattgctagctttgacctgattttccggccttggttgcccgatattgtcagtcaaggcctccaagctccaagtttgattgatttggtcgggtctgttttttacagtggggtggtggaagaagtcatgctccgcttcggcttgatgaccctcttcttgtacattattagcttccaagccagaagggtgactaagggccgggtcatcttcactattgtttttcaaacagtactttttatgctggcctatttacccaatgtgaccacctaccttgacttgactccagtggttgtcatccggctttttgtctttgtcggcctgtctaacctcttgttttcctacctttactaccgctaccatattgaagctgcgatgattagtcatatgaccagcgttttggtatccggcctgttagctagcctattagcccttattgcctag

SEQ ID NO: 3822 - protein, 210 aa, Alloiococcus otitidis
MASLLTVIQPFFLAVLALLAGHFFTYRLGLGSVVYDYFDSQKVAKAKLKVSLQPALALGLLYGLMIASFDLIFRPWLPDIVSQGLQAPSLIDLVGSVFYSGVVEEVMLRFGLMTLFLYIISFQARRVTKGRVIFTIVFQTVLFMLAYLPNVTTYLDLTPVVVIRLFVFVGLSNLLFSYLYYRYHIEAAMISHMTSVLVSGLLASLLALIA

SEQ ID NO: 3823 - DNA, 927 bp, Alloiococcus otitidis; identical to SEQ ID NO: 3821
  CDS (67)..(924)

SEQ ID NO: 3824 - protein, 286 aa, Alloiococcus otitidis
MSNKEQSKKKDVNQEGGQGTRQVGFTGPNVSDKPSWSPFFVYIAILLLAFSLFFPSLYRESQRIIDLAGVEDLSAFMASLLTVIQPFFLAVLALLAGHFFTYRLGLGSVVYDYFDSQKVAKAKLKVSLQPALALGLLYGLMIASFDLIFRPWLPDIVSQGLQAPSLIDLVGSVFYSGVVEEVMLRFGLMTLFLYIISFQARRVTKGRVIFTIVFQTVLFMLAYLPNVTTYLDLTPVVVIRLFVFVGLSNLLFSYLYYRYHIEAAMISHMTSVLVSGLLASLLALIA

SEQ ID NO: 3825 - DNA, 1572 bp, Alloiococcus otitidis
  CDS (1)..(1569)
atggaaaagaaaaaaatcaccatctaccaaacttcagatgtacacggctacctctatcccagtaattaccaagcccgggatgaagaccaggctttcggcctctttaaactggccagcctcttaaaagagggtagggatggatcgtccattctagtggaaaacggagactttctccaagggtctccttttagctactatatttacaagcatgaccataaagctgaccgactcatggaagcctataatgacttggactttgatctaggggtctttggcaaccatgaatttaattacggcctagactacttgaagtcagccatctcagctagtcactttcccatcctggccgctaacatcctagatgaggagggtcagccagctttgggcgaagcctatgaaattctggaaagggatggggttcaaattgccatcttgggattaacgacccaatacatcccccactttgaacacccagaccatattaaggggttgacctttgcttcagccattgagacagcccagaaatacctgcccctcttacgagaccaagccgacctggtcattgtttcctaccatgggggctttgaagttgacttaaatgaagagcttggagataaggctgcctggtccgatactggggaaaatgaaggcttagccttgctagaagcttgcggggattccattgacctctttttaaccggtcaccaacacaagctctaccaaggccaggtccaaggcaccccagtcttgatgccaggccacaaagggtcccacctggccaaggcagacctcttcttagaaaaacaagatggccagtggactttaaccgactgcaagcccaaactcctcccagtcgagtccaggacaggtgtagaccaagatttggcaggcaagtttcaggaagttaaccaggaagtggaagattggttggacactgacttgggttacgatagcaataacaatcttaatattgaagatgtccaccaggctaggttagagggccacccatatatcgagttcatcaaccgggtccaaatgtatttcagccaggccccaatttcggctagctccttctttaacaatgatgtcaagggctttaaagagcaaattaccatgcgggatattgtcagcaactacatttatcccaacaccttagccgttgtcaaaattaccggtcaggacttgaaggctgcccttgagcaaactgctgaatactatgacttagatgaagcgggacatttagtcatcaatgaagcatggttaaagcccaagccgcaagtctataactatgatatctaccaaggaattgactatactttagatatacaaaaagacaagggacagcgagtgaccaaacttgaattccagggtcagtacatccagcctgaccaagagttagaacttgttttaaaccagtaccgggctgtgggcgggggagactaccatatgttcggcagccaaaaaattgtccgagaagtaacccgtcccatgactgagttgattgcagaatacatcgaaaaatttggccccctaaagattcctcaaccaagtaattttaaggtgacttattga

SEQ ID NO: 3826 - protein, 523 aa, Alloiococcus otitidis
MEKKKITIYQTSDVHGYLYPSNYQARDEDQAFGLFKLASLLKEGRDGSSILVENGDFLQGSPFSYYIYKHDHKADRLMEAYNDLDFDLGVFGNHEFNYGLDYLKSAISASHFPILAANILDEEGQPALGEAYEILERDGVQIAILGLTTQYIPHFEHPDHIKGLTFASAIETAQKYLPLLRDQADLVIVSYHGGFEVDLNEELGDKAAWSDTGENEGLALLEACGDSIDLFLTGHQHKLYQGQVQGTPVLMPGHKGSHLAKADLFLEKQDGQWTLTDCKPKLLPVESRTGVDQDLAGKFQEVNQEVEDWLDTDLGYDSNNNLNIEDVHQARLEGHPYIEFINRVQMYFSQAPISASSFFNNDVKGFKEQITMRDIVSNYIYPNTLAVVKITGQDLKAALEQTAEYYDLDEAGHLVINEAWLKPKPQVYNYDIYQGIDYTLDIQKDKGQRVTKLEFQGQYIQPDQELELVLNQYRAVGGGDYHMFGSQKIVREVTRPMTELIAEYIEKFGPLKIPQPSNFKVTY

SEQ ID NO: 3827 - DNA, 204 bp, Alloiococcus otitidis
  CDS (1)..(201)
atgataacacacttccccaaaggaacacacttgaccctagccgaaattcataaaatcgaagcctataaggcagaaggctatgccaatcagcagattgccaagctgctcgggcgctgtccgcaaaccatccacaatgccatcaaaacaggttctgtcccccaaaaacgtcagcaaaaacactatgggaaaacttacacctactag

SEQ ID NO: 3828 - protein, 67 aa, Alloiococcus otitidis
MITHFPKGTHLTLAEIHKIEAYKAEGYANQQIAKLLGRCPQTIHNAIKTGSVPQKRQQKHYGKTYTY

SEQ ID NO: 3829 - DNA, 183 bp, Alloiococcus otitidis
  CDS (1)..(180)
atgatgattaatattgataaagagaagaagattattaagattggctttggtgctgaagaaaaagaagatcatattcaaagatggacatttatccaaatttacaaacctactaaaacaaatttcataagtaaacttccgaaagaacacgataatatttttgagatggcttttaatgcacgatag

SEQ ID NO: 3830 - protein, 60 aa, Alloiococcus otitidis
MMINIDKEKKIIKIGFGAEEKEDHIQRWTFIQIYKPTKTNFISKLPKEHDNIFEMAFNAR

SEQ ID NO: 3831 - DNA, 846 bp, Alloiococcus otitidis
  CDS (46)..(843)
gtaaacttccgaaagaacacgataatatttttgagatggcttttaatgcacgatagatttatcttattaaaaaagagggtaagaaagatcgttttaattttcttacccctttttttaaaaacaaaaaatgataattatattaaagcgaattcagaattgattttctttgttatcttttcaaaaactactgatgtagaaattatcaatgttatagataagtttctagatcaatttaaagaaatgtcaatggaaacagatccgaggaacctttcaacttatttgctaactgaaatttataagcaagtaaatactggcatttcgaattttgaagaatattcgttttgcattaagggtatcgataattttgattttacaaaaaaagaaatatcgtgttatttatcaatattaaccaataaagttgataataatattgatcaatactttgatgatgagcaattagagttgcttagaacaacgataccaacagtagatgatatatattattttacacacgatatattctatttaacttatctaaatagcaaacaagaatattttagtatgttgagttcttataagagggaaattataaatgaatttatttattcatgtatagttttttgtatgatcagcaataacatggatttattgggcgaattgctaattagttatagtttagtgaacggaaaaattagcaaagctaattcattgatcaatatgggtttgaattatattgaacaatatgtagatgaagtcgaatcaaatttgatacttactgaatcgttttttttacaatcataccatactattttagtgatactgattcttgctttaattaatgaataa

SEQ ID NO: 3832 - protein, 266 aa, Alloiococcus otitidis
MHDRFILLKKRVRKIVLIFLPLFLKTKNDNYIKANSELIFFVIFSKTTDVEIINVIDKFLDQFKEMSMETDPRNLSTYLLTEIYKQVNTGISNFEEYSFCIKGIDNFDFTKKEISCYLSILTNKVDNNIDQYFDDEQLELLRTTIPTVDDIYYFTHDIFYLTYLNSKQEYFSMLSSYKREIINEFIYSCIVFCMISNNMDLLGELLISYSLVNGKISKANSLINMGLNYIEQYVDEVESNLILTESFFLQSYHTILVILILALINE

SEQ ID NO: 3833 - DNA, 846 bp, Alloiococcus otitidis; identical to SEQ ID NO: 3831
  CDS (31)..(843)

SEQ ID NO: 3834 - protein, 271 aa, Alloiococcus otitidis
MRWLLMHDRFILLKKRVRKIVLIFLPLFLKTKNDNYIKANSELIFFVIFSKTTDVEIINVIDKFLDQFKEMSMETDPRNLSTYLLTEIYKQVNTGISNFEEYSFCIKGIDNFDFTKKEISCYLSILTNKVDNNIDQYFDDEQLELLRTTIPTVDDIYYFTHDIFYLTYLNSKQEYFSMLSSYKREIINEFIYSCIVFCMISNNMDLLGELLISYSLVNGKISKANSLINMGLNYIEQYVDEVESNLILTESFFLQSYHTILVILILALINE

SEQ ID NO: 3835 - DNA, 714 bp, Alloiococcus otitidis
  CDS (16)..(711)
ataaggatatattctatgtcaaaagaatttaatactgagtcttttaaattatacaaatacaaagaaattgaaagcagaatactaagttttgatattgaaagaaaagtaatttttatatatttttttaagaaaaatggtattttgacgaaatcaatgcaaattgaactagagtccagttattataaggtactatcaataaatgaagatattataaaaatttcccctaataaatatggagaattaattgctcatgtcctgatgaatactatttgtaatagttattctccaaatgttgctgatcttagattacttaatggtatgtttatctatgcttgtcagaagaaaagaccgatactaattattctgttatcgttgatattgcaaaattatgatggactttttaaatttaataatttaaaatatggaataaaatttgaagatgaattactaaatgtttttaggctattaaatattgaaccattacatagttatgaagaaaataaaatagataacataaagaatgagtatataaaattcccaaaaatgagagagattgaggcatctgaaatgaaaaattgtaagtttaacgacgaaaatcaaatgactaaaaaagaaaaaattgtagaaatggaagagactttaattgaattagaagaacaattgattgaattagaggaattagaaatcgaaaggttcgaatgccgtgttgagtag

SEQ ID NO: 3836 - protein, 232 aa, Alloiococcus otitidis
MSKEFNTESFKLYKYKEIESRILSFDIERKVIFIYFFKKNGILTKSMQIELESSYYKVLSINEDIIKISPNKYGELIAHVLMNTICNSYSPNVADLRLLNGMFIYACQKKRPILIILLSLILQNYDGLFKFNNLKYGIKFEDELLNVFRLLNIEPLHSYEENKIDNIKNEYIKFPKMREIEASEMKNCKFNDENQMTKKEKIVEMEETLIELEEQLIELEELEIERFECRVE

SEQ ID NO: 3837 - DNA, 1746 bp, Alloiococcus otitidis
  CDS (454)..(1743)
aaaagaagtttgataattgataacgatagaagtaggttgagcatggttcacaattatacaaaggaatttttccgcaacaataaaataaatgtcctcttcactgtacttgtatatataacgaatgctggggttaatattggtgtgtcatggtacatacaaatcatcatggacctgatggccggagattctaactacagctttgtcatggttgttcagctggttttcattctctttttaatcttaatcatttcatcaacgacatcttactttacctatcctttatttttgcagagggccatggttcagtataaggaaaaagctttcaagcaattgttgaagaaaaatatatcctcttttgcaaatgaaagtactgctacctatatttcagcttacaccaatgatgccatcagcatcgaagataattatttgaagacaatttttgaactgattcaaatggtgatcatgttttttggatcattagctttaatgctagcttatagtggaagattaacactagttgcagtattactatcggtacttcctcttttggcttctatccttactgggaatacattagcaaggaaagaagagaatgtttcaaatcaaaatgaaaaatatgttgctagcattaaggatgttctaagtggcttctcaattgttaaaagtttccaagcagaaagagaaattggccacttattcaatgcaaatattgctcgattagaggatgctaaatattcgcgtaaccaagccatggtatttattcaaagtattggcaatcttgctcaaatcattgctcaattgggggttatgttagcaggtgcttggatggtactaaaccagctagccggattgacaccgggcatggttatggcatttacaaacctaatgaactttgtaatgcaaccgcttgccttgatcccacaacttctcgcccaacgaaaagccgggcaagctttgatcaaaaaattagctaagaatttagaccaccatgttagcgatgagggcttagatcttggtgtggttactaatccaccagacttaagacttgatcaggtcaactatgcttacgaagaagggaagctagctttaaaaaatatttcatataaatttgagtcgaaaaaatcttacgccattgttggtgggtcaggatctggcaagtctacattattaaacttgctcatgattaatgatagtgactataatggaaatatttatataggaaaagataatatcaaggatattttaaaatcatcattgtattccttccttacccaaatacagcaaaatgttttcatctttaacgccagtttaagagaaaatattaccatgtttaaatccttccctaatcagcaagttgaaagggttatcgaaatgtccggcttgtctcaacttatccaggagcgtggggatgactttcttgcaggtgaaaatgggaataaactttccggaggtgaaaagcaacgcattgctattgccagagccttattaaaagatagccaagtcctcttggtagatgaagccactagtgctttggataatcaaacggcacagcaaattaacaaagtcattttggacttaaaagagattactagaattgtggtaacccaccgtttagactcaaatattttacgtcaatatgatgaaatcttggttttaaaagatggtgaactaatcgagcatgggaagttcgatgacctaatggcagacaagcaatacttttattcactatacatggtcgcaaattaa

SEQ ID NO: 3838 - protein, 430 aa, Alloiococcus otitidis
MVIMFFGSLALMLAYSGRLTLVAVLLSVLPLLASILTGNTLARKEENVSNQNEKYVASIKDVLSGFSIVKSFQAEREIGHLFNANIARLEDAKYSRNQAMVFIQSIGNLAQIIAQLGVMLAGAWMVLNQLAGLTPGMVMAFTNLMNFVMQPLALIPQLLAQRKAGQALIKKLAKNLDHHVSDEGLDLGVVTNPPDLRLDQVNYAYEEGKLALKNISYKFESKKSYAIVGGSGSGKSTLLNLLMINDSDYNGNIYIGKDNIKDILKSSLYSFLTQIQQNVFIFNASLRENITMFKSFPNQQVERVIEMSGLSQLIQERGDDFLAGENGNKLSGGEKQRIAIARALLKDSQVLLVDEATSALDNQTAQQINKVILDLKEITRIVVTHRLDSNILRQYDEILVLKDGELIEHGKFDDLMADKQYFYSLYMVAN

SEQ ID NO: 3839 - DNA, 1746 bp, Alloiococcus otitidis; identical to SEQ ID NO: 3837
  CDS (427)..(1743)

SEQ ID NO: 3840 - protein, 439 aa, Alloiococcus otitidis
MKTIFELIQMVIMFFGSLALMLAYSGRLTLVAVLLSVLPLLASILTGNTLARKEENVSNQNEKYVASIKDVLSGFSIVKSFQAEREIGHLFNANIARLEDAKYSRNQAMVFIQSIGNLAQIIAQLGVMLAGAWMVLNQLAGLTPGMVMAFTNLMNFVMQPLALIPQLLAQRKAGQALIKKLAKNLDHHVSDEGLDLGVVTNPPDLRLDQVNYAYEEGKLALKNISYKFESKKSYAIVGGSGSGKSTLLNLLMINDSDYNGNIYIGKDNIKDILKSSLYSFLTQIQQNVFIFNASLRENITMFKSFPNQQVERVIEMSGLSQLIQERGDDFLAGENGNKLSGGEKQRIAIARALLKDSQVLLVDEATSALDNQTAQQINKVILDLKEITRIVVTHRLDSNILRQYDEILVLKDGELIEHGKFDDLMADKQYFYSLYMVAN

SEQ ID NO: 3841 - DNA, 1746 bp, Alloiococcus otitidis; identical to SEQ ID NO: 3837
  CDS (43)..(1743)

SEQ ID NO: 3842 - protein, 567 aa, Alloiococcus otitidis
MVHNYTKEFFRNNKINVLFTVLVYITNAGVNIGVSWYIQIIMDLMAGDSNYSFVMVVQLVFILFLILIISSTTSYFTYPLFLQRAMVQYKEKAFKQLLKKNISSFANESTATYISAYTNDAISIEDNYLKTIFELIQMVIMFFGSLALMLAYSGRLTLVAVLLSVLPLLASILTGNTLARKEENVSNQNEKYVASIKDVLSGFSIVKSFQAEREIGHLFNANIARLEDAKYSRNQAMVFIQSIGNLAQIIAQLGVMLAGAWMVLNQLAGLTPGMVMAFTNLMNFVMQPLALIPQLLAQRKAGQALIKKLAKNLDHHVSDEGLDLGVVTNPPDLRLDQVNYAYEEGKLALKNISYKFESKKSYAIVGGSGSGKSTLLNLLMINDSDYNGNIYIGKDNIKDILKSSLYSFLTQIQQNVFIFNASLRENITMFKSFPNQQVERVIEMSGLSQLIQERGDDFLAGENGNKLSGGEKQRIAIARALLKDSQVLLVDEATSALDNQTAQQINKVILDLKEITRIVVTHRLDSNILRQYDEILVLKDGELIEHGKFDDLMADKQYFYSLYMVAN

SEQ ID NO: 3843 - DNA, 1746 bp, Alloiococcus otitidis; identical to SEQ ID NO: 3837
  CDS (10)..(1743)

SEQ ID NO: 3844 - protein, 578 aa, Alloiococcus otitidis
MIIDNDRSRLSMVHNYTKEFFRNNKINVLFTVLVYITNAGVNIGVSWYIQIIMDLMAGDSNYSFVMVVQLVFILFLILIISSTTSYFTYPLFLQRAMVQYKEKAFKQLLKKNISSFANESTATYISAYTNDAISIEDNYLKTIFELIQMVIMFFGSLALMLAYSGRLTLVAVLLSVLPLLASILTGNTLARKEENVSNQNEKYVASIKDVLSGFSIVKSFQAEREIGHLFNANIARLEDAKYSRNQAMVFIQSIGNLAQIIAQLGVMLAGAWMVLNQLAGLTPGMVMAFTNLMNFVMQPLALIPQLLAQRKAGQALIKKLAKNLDHHVSDEGLDLGVVTNPPDLRLDQVNYAYEEGKLALKNISYKFESKKSYAIVGGSGSGKSTLLNLLMINDSDYNGNIYIGKDNIKDILKSSLYSFLTQIQQNVFIFNASLRENITMFKSFPNQQVERVIEMSGLSQLIQERGDDFLAGENGNKLSGGEKQRIAIARALLKDSQVLLVDEATSALDNQTAQQINKVILDLKEITRIVVTHRLDSNILRQYDEILVLKDGELIEHGKFDDLMADKQYFYSLYMVAN

SEQ ID NO: 3845 - DNA, 1077 bp, Alloiococcus otitidis
  CDS (97)..(1074)
caggactttttaattgacatcactgtttgctttacttgccactggagaaagtttattgttagagtaatgaaatccaataggttaggggatgggtgtatgacaagtttaaaagatattgcaaaaattgctggagttgccaaaagtactgtttctagatacttaaaccagggccaggttagtgaaaaaacgaaagagaaaattcgtcaagctatcgaagagacgggttaccggccaaataatttggctaggtctttgaagtcacaatcctccaaattaatcggagttgtcattcctcgttttgattctggagctaccagctcagttttaaagggcttagaccaggcagcttttcagtcaggttatcaattgctaattattaattcaaatttagaccgaaaaagggaagctgaaaaccttaaaattttggccaacaaaaaagtagcgggaattattttattagccagccatctttctccacaactcattcaacaaatagaccagctgccattacctattatcgtcctggggcaaaaagcagaccaattatcttatatctgccatgacgactaccaagctggctataaagtggctagccaccttgcggacttaaactatcaaaatattttttacattggagtttcttctaaagacccagctgtggggatagatcgcaagaaaggttttcttgaaagttgtaaccattatggccaaagggttaaagtcattcaatcaaatttttctaaggaagataattataagttagctcaaaaattactcaaagataatttgccagcaacttatatcgcctgtgcaaccgaccacatggccattgcatttttaaaagcagctcaagaattaaattatgtcataccggaccagctagccatctccggttttggcgggtacaatgattttgactactactatcctggtctaacaacggtcaagtatccctaccaagaaagtggaactctagcctttcacagtttactggacctgatctcaggtcaaagcagtcaggttcagactgtcttagacaaccaactccttatcagggaaagcacgcaagtcaaataa

SEQ ID NO: 3846 - protein, 326 aa, Alloiococcus otitidis
MTSLKDIAKIAGVAKSTVSRYLNQGQVSEKTKEKIRQAIEETGYRPNNLARSLKSQSSKLIGVVIPRFDSGATSSVLKGLDQAAFQSGYQLLIINSNLDRKREAENLKILANKKVAGIILLASHLSPQLIQQIDQLPLPIIVLGQKADQLSYICHDDYQAGYKVASHLADLNYQNIFYIGVSSKDPAVGIDRKKGFLESCNHYGQRVKVIQSNFSKEDNYKLAQKLLKDNLPATYIACATDHMAIAFLKAAQELNYVIPDQLAISGFGGYNDFDYYYPGLTTVKYPYQESGTLAFHSLLDLISGQSSQVQTVLDNQLLIRESTQVK

SEQ ID NO: 3847 - DNA, 1077 bp, Alloiococcus otitidis; identical to SEQ ID NO: 3845
  CDS (67)..(1074)

SEQ ID NO: 3848 - protein, 336 aa, Alloiococcus otitidis
MKSNRLGDGCMTSLKDIAKIAGVAKSTVSRYLNQGQVSEKTKEKIRQAIEETGYRPNNLARSLKSQSSKLIGVVIPRFDSGATSSVLKGLDQAAFQSGYQLLIINSNLDRKREAENLKILANKKVAGIILLASHLSPQLIQQIDQLPLPIIVLGQKADQLSYICHDDYQAGYKVASHLADLNYQNIFYIGVSSKDPAVGIDRKKGFLESCNHYGQRVKVIQSNFSKEDNYKLAQKLLKDNLPATYIACATDHMAIAFLKAAQELNYVIPDQLAISGFGGYNDFDYYYPGLTTVKYPYQESGTLAFHSLLDLISGQSSQVQTVLDNQLLIRESTQVK

SEQ ID NO: 3849 - DNA, 1395 bp, Alloiococcus otitidis
  CDS (1162)..(1392)
gaggttatgggaatggctaaaggttcaaatgaacaaatcgtaagtgaattactagaagcagttggtggtcctgaaaatatcaaaaattatgagcattgtgccactcggatgcggattgtcctaaaagatgacaacaagctagaccaagacaaggcagatagtgtgaccgatgttaagggttacttttttaacacaggtcaacaccagtttatttttgggactggaaaggtaaatgaagtttacaagtctttcgatcattatattggtaaatcaaatacggcttctggtcaagcgcatgctgaaagcgacaatacatatcagaacttatctctgcttcaaagactggtaagagtttttgcagatattttagtacccctaataccagctttagtcacaacgggtttattaatgggattaagagggcttctagttgaactcggtctagacatgactccagagatggaagaggcttttgttatcttaactgacactgcctttgcctttttgcctgttttaattgcctacagtgctacgcgtaagtttgacggaaatccggtcttaggtatcttagttggcttgatgatggtcgcaccccaactccccaatgcctatgaagtggcggagggggctagtcaacctctaactgtttttggaattgatttagttggttaccaagggtctatttttccctctattattgccggctggttgattggtaaattagaagcttggctcagacgttgggtccctgagataatggatttaattgtgacaccttttctaaccatcttggttactgttggtcttattttcttcttggttggccctatcattcaagtcctcgaatctgcagtcatcaatggtattgtttcaattattaatgcaccatttgggctgggctacctggtcttttctgctctgcaacaattaatcgtcattacaggtcttcaccattcttttagtattatagaactcaacttgctctcttccaccggcttcaatatgatccaacccctgacaagtgtcagtatggcagggcaatttggtgcagcgatcggcatggctgttttagtgaaggataaggtcaagcggtccaatatgatctctgccagcctccccagtctattcggtataactgaacccctcttatttggagtcaacatgcggtcggtccgggtctttgcatctggcatgttagccggtggactagggggcttactcatttctttctttgacctagccgctcctggcatgggaattacttttattcctggtttattgctgtattctggtgatttttctgctatgctacaatatgtccttgttattttactatcttttagctttggtatcctattcgtttacctgcaaaaaaataaaattcatcacgtttaa

SEQ ID NO: 3850 - protein, 77 aa, Alloiococcus otitidis
MRSVRVFASGMLAGGLGGLLISFFDLAAPGMGITFIPGLLLYSGDFSAMLQYVLVILLSFSFGILFVYLQKNKIHHV

SEQ ID NO: 3851 - DNA, 1395 bp, Alloiococcus otitidis; identical to SEQ ID NO: 3849
  CDS (757)..(1392)

SEQ ID NO: 3852 - protein, 212 aa, Alloiococcus otitidis
MDLIVTPFLTILVTVGLIFFLVGPIIQVLESAVINGIVSIINAPFGLGYLVFSALQQLIVITGLHHSFSIIELNLLSSTGFNMIQPLTSVSMAGQFGAAIGMAVLVKDKVKRSNMISASLPSLFGITEPLLFGVNMRSVRVFASGMLAGGLGGLLISFFDLAAPGMGITFIPGLLLYSGDFSAMLQYVLVILLSFSFGILFVYLQKNKIHHV

SEQ ID NO: 3853 - DNA, 1395 bp, Alloiococcus otitidis; identical to SEQ ID NO: 3849
  CDS (505)..(1392)

SEQ ID NO: 3854 - protein, 296 aa, Alloiococcus otitidis
MPVLIAYSATRKFDGNPVLGILVGLMMVAPQLPNAYEVAEGASQPLTVFGIDLVGYQGSIFPSIIAGWLIGKLEAWLRRWVPEIMDLIVTPFLTILVTVGLIFFLVGPIIQVLESAVINGIVSIINAPFGLGYLVFSALQQLIVITGLHHSFSIIELNLLSSTGFNMIQPLTSVSMAGQFGAAIGMAVLVKDKVKRSNMISASLPSLFGITEPLLFGVNMRSVRVFASGMLAGGLGGLLISFFDLAAPGMGITFIPGLLLYSGDFSAMLQYVLVILLSFSFGILFVYLQKNKIHHV

SEQ ID NO: 3855 - DNA, 1395 bp, Alloiococcus otitidis; identical to SEQ ID NO: 3849
  CDS (7)..(1392)

SEQ ID NO: 3856 - protein, 462 aa, Alloiococcus otitidis
MGMAKGSNEQIVSELLEAVGGPENIKNYEHCATRMRIVLKDDNKLDQDKADSVTDVKGYFFNTGQHQFIFGTGKVNEVYKSFDHYIGKSNTASGQAHAESDNTYQNLSLLQRLVRVFADILVPLIPALVTTGLLMGLRGLLVELGLDMTPEMEEAFVILTDTAFAFLPVLIAYSATRKFDGNPVLGILVGLMMVAPQLPNAYEVAEGASQPLTVFGIDLVGYQGSIFPSIIAGWLIGKLEAWLRRWVPEIMDLIVTPFLTILVTVGLIFFLVGPIIQVLESAVINGIVSIINAPFGLGYLVFSALQQLIVITGLHHSFSIIELNLLSSTGFNMIQPLTSVSMAGQFGAAIGMAVLVKDKVKRSNMISASLPSLFGITEPLLFGVNMRSVRVFASGMLAGGLGGLLISFFDLAAPGMGITFIPGLLLYSGDFSAMLQYVLVILLSFSFGILFVYLQKNKIHHV

SEQ ID NO: 3857 - DNA, 1332 bp, Alloiococcus otitidis
  CDS (4)..(1329)
gcgatggcagaggcaaaccatgattttgaccaatggcggcaagcttaccacttgatgccgaagcggggttggctgaacgatcccaatggcgccgtttatttcaaggggacctaccatgtctaccaccaatatgttcccgataaccccaaaggtggggcaacccactgggggcacaagacctccaaggacctggttcactttaaagaagaacccgtcttcttgtcaccaggcaagtgctttgacaaggacggggtctattcaggtggtgccatgaagttgggggaccaaatccatttcttctataccggcaatgtcaaaaaagaaggggattatgactacctttacaatggtcgcgaccagaatgttgtccacgtggtcagctcagacggctacagcattgaccaaagacatgtcgtcatcccccatgaagatttccctcccggttttaccaatcatataagagaccccaaagtcttccagcatggcaatttattttacatgatcttaggggggcggaagttggataatacgggtgctatcctcctatttgaatcagaagacttggaccattgggactacaagggcaacttgcttgaaggcaatgaagaccaaggctatatgtgggaagccccggacttggttgaatttggcgaccaggcagtcttgcttttttcacctcaggggattagagccaaccacaacagttttttaaacccccattcagctggctacctagtcgggcggatggactgggacagtctccagtttattcccaagggtcccatcaaggaattagaccaaggctttgacttctatgcccctcatacctttgatgatggccaccggactattatgtgggcctggatgggagtttctgacagctcaccagaatatatttatcccaccgtaaaccggggttggcaacactgtttgaccatgccccgtcttttagaactcaagggggaccgcttgcttcagaagcccttgcaagaatacgagaatatccggactaaccggctggaaattcagaacactaaaaaaattgcctacggggacattgtgggccatagctatgaatttgaccttgactttgtcgaccagccaagccacttcactcttgacctcctagaagatacccgcttagcttataaagaagggacattaactttgaatcatggtccatccggttacggcagacgaagccgtcagttagaccttgattcaatcagccacttgcaaatatttgttgaccattcttccctggaaatttttgtcaaccatggggaagcggtcttttctagccgggtattccccaggcacaaaagaaaataa

SEQ ID NO: 3858 - protein, 442 aa, Alloiococcus otitidis
MAEANHDFDQWRQAYHLMPKRGWLNDPNGAVYFKGTYHVYHQYVPDNPKGGATHWGHKTSKDLVHFKEEPVFLSPGKCFDKDGVYSGGAMKLGDQIHFFYTGNVKKEGDYDYLYNGRDQNVVHVVSSDGYSIDQRHVVIPHEDFPPGFTNHIRDPKVFQHGNLFYMILGGRKLDNTGAILLFESEDLDHWDYKGNLLEGNEDQGYMWEAPDLVEFGDQAVLLFSPQGIRANHNSFLNPHSAGYLVGRMDWDSLQFIPKGPIKELDQGFDFYAPHTFDDGHRTIMWAWMGVSDSSPEYIYPTVNRGWQHCLTMPRLLELKGDRLLQKPLQEYENIRTNRLEIQNTKKIAYGDIVGHSYEFDLDFVDQPSHFTLDLLEDTRLAYKEGTLTLNHGPSGYGRRSRQLDLDSISHLQIFVDHSSLEIFVNHGEAVFSSRVFPRHKRK

SEQ ID NO: 3859 - DNA, 1587 bp, Alloiococcus otitidis
  CDS (934)..(1584)
ataggagttttaaaagttatggacaaccgtattggaaagattagatatattatcttaggaataatagtcggcgtcctatccggtatcattatcagcttattccggatttcagctaactttcttatatcttataccgaagatatctatgcctttctcagatctactgacaaccctatctggcttatattttggatcttgttcagtatcttcttggggggcattattatttggctcatcaactcggaaccggacatccaagggtcggtccaaaacatccaaggccacattcaaggcctctttaagatggactggctatcggttttaatcaaaaaattcattggtggggttatttccctgggatctgctatggcggtcggccgtgaaggcccttccatccaaatcgggagcgtggtaggcctcggcgttgattctttcttgggccgaagccgggcagatgaaaacctcctcctatcagctggggccagtgcaggtttagctgctgcctttaacaccccggttgctgccgtcttattaattatcgaagaagtctaccacaagttctctgaaagtctcttcttggtcaccttgactgcatctgtagccggtaactttgtttcctacaatgtctttggggttaagccgattattgacctggatgtcttggctgaattccctcttgaccagtacatttacctagttattttaggaatcataatgggaattgccggtttcatcttccaagaagttttcttaagagtacctagttggtaccgcaaactccctattcccaactacttaatccccatattctcctttctggttgttattccatttggtttatttgcccctaacctattaggtgacggaactaaccttatttttgaaattcaagatggttggtacaccctaggagctatcgctctgatctgcttcttgcgttttgtctttatccaagcttcttacggagccggggcacctggtggtttcttcctgccaacccttactctaggagccttagtcggagccgtttttgggactgccttgcacaactacctatctgtggaacaattcttaatcatgaactttatggtctatgccatggcgggacttttgacctcagtcaccaatgccactcttacctccgtggtcctcttgctagaattaactgaatcagtcacccatatcatgccccttgccattgtctgtttattgagcttctctaccgcacgacttttaaaatcggaccctatttacgaagttctcttaatgcggaaaatcaaacttccttactcagccttgaaaggatctatctctgaaagtgaactgatagttgaatccaatagccgactagacaatatggtggttagagacctcaacatgccagccccttcccacatcaccaagattaaccgtgaccaccgggaatttatccctaaagctaataccattattaaagccaatgacctgattaccttccaggctgatatcgggatcgcttcagaagccatccactacttggaagacttgaacaagaaccaagattcttaccaagacattaaagacaagtcttttgacagtgaaagctaa

SEQ ID NO: 3860 - protein, 217 aa, Alloiococcus otitidis
MRFVFIQASYGAGAPGGFFLPTLTLGALVGAVFGTALHNYLSVEQFLIMNFMVYAMAGLLTSVTNATLTSVVLLLELTESVTHIMPLAIVCLLSFSTARLLKSDPIYEVLLMRKIKLPYSALKGSISESELIVESNSRLDNMVVRDLNMPAPSHITKINRDHREFIPKANTIIKANDLITFQADIGIASEAIHYLEDLNKNQDSYQDIKDKSFDSES

SEQ ID NO: 3861 - DNA, 1587 bp, Alloiococcus otitidis; identical to SEQ ID NO: 3859
  CDS (436)..(1584)

SEQ ID NO: 3862 - protein, 383 aa, Alloiococcus otitidis
MGRSRADENLLLSAGASAGLAAAFNTPVAAVLLIIEEVYHKFSESLFLVTLTASVAGNFVSYNVFGVKPIIDLDVLAEFPLDQYIYLVILGIIMGIAGFIFQEVFLRVPSWYRKLPIPNYLIPIFSFLVVIPFGLFAPNLLGDGTNLIFEIQDGWYTLGAIALICFLRFVFIQASYGAGAPGGFFLPTLTLGALVGAVFGTALHNYLSVEQFLIMNFMVYAMAGLLTSVTNATLTSVVLLLELTESVTHIMPLAIVCLLSFSTARLLKSDPIYEVLLMRKIKLPYSALKGSISESELIVESNSRLDNMVVRDLNMPAPSHITKINRDHREFIPKANTIIKANDLITFQADIGIASEAIHYLEDLNKNQDSYQDIKDKSFDSES

SEQ ID NO: 3863 - DNA, 1587 bp, Alloiococcus otitidis; identical to SEQ ID NO: 3859
  CDS (19)..(1584)

SEQ ID NO: 3864 - protein, 522 aa, Alloiococcus otitidis
MDNRIGKIRYIILGIIVGVLSGIIISLFRISANFLISYTEDIYAFLRSTDNPIWLIFWILFSIFLGGIIIWLINSEPDIQGSVQNIQGHIQGLFKMDWLSVLIKKFIGGVISLGSAMAVGREGPSIQIGSVVGLGVDSFLGRSRADENLLLSAGASAGLAAAFNTPVAAVLLIIEEVYHKFSESLFLVTLTASVAGNFVSYNVFGVKPIIDLDVLAEFPLDQYIYLVILGIIMGIAGFIFQEVFLRVPSWYRKLPIPNYLIPIFSFLVVIPFGLFAPNLLGDGTNLIFEIQDGWYTLGAIALICFLRFVFIQASYGAGAPGGFFLPTLTLGALVGAVFGTALHNYLSVEQFLIMNFMVYAMAGLLTSVTNATLTSVVLLLELTESVTHIMPLAIVCLLSFSTARLLKSDPIYEVLLMRKIKLPYSALKGSISESELIVESNSRLDNMVVRDLNMPAPSHITKINRDHREFIPKANTIIKANDLITFQADIGIASEAIHYLEDLNKNQDSYQDIKDKSFDSES

SEQ ID NO: 3865 - DNA, 1128 bp, Alloiococcus otitidis
  CDS (304)..(1125)
atgaaccctttagcctatttatttttaattattggtttaggttacctaattgggtcgattgatattttcgggatcaagttcggtaattctgccatcatcttagttggtattgttttcggccattttggagcccaaattccggatatggtggggactctcggcttggtcatgtttatcggggctgtcggtctgaaggcaggcaagaacattctgtattttttaaaaaccaatggactaagcttcctccttattgccctctttgtgattagcttatcaggaatcctctccctccttttttactacatgacagggattgacaaggacctagtgatgggaattttatctggagccatgacttccaccaccgcccttgccaccgcccaggaagctggagcgggccaattggcagttattggctatgggatcacctatatttttggtgttgtaggcatcgttagcttggtccaagtcatgcccaagctaatgggggtcaaccaggaagaagaaatcgacaagttaagaccccctaaaaattccacgggggctcctagcctagctggcttcaagcaaattgacaaaaatggcttatttgtattcttcaccaccctcctcttggggatgatcttagggagtttagaagtccccttacctggtgggagtcaattcagcctgggcaactcaggaggacccttgatagtagggcttttggctggccactttaagcgaatcggtcagattaatattgaaattcccaacgatattttaaatgtcttctccagcctaggcatttccttattcctcagtgactctggaatcaatgctggacaaggaattgtggatatcttaggtgactacggactccaaatcttcattatgggaatgatcatgaccttggtcacctctctcctgggtttcgccctggcttacctgatctttaaactccctgtttatggggctttagggacgacgaccggggccatgacttcagcaccttccctaggggccttaatggaaagctcccaaaccgacctggtcgttcccttttatgctgcctgccaacctattgccaccatcctcctggtctttttgccccaggtccttaacttgattattgcggcagtcggctaa

SEQ ID NO: 3866 - protein, 274 aa, Alloiococcus otitidis
MTGIDKDLVMGILSGAMTSTTALATAQEAGAGQLAVIGYGITYIFGVVGIVSLVQVMPKLMGVNQEEEIDKLRPPKNSTGAPSLAGFKQIDKNGLFVFFTTLLLGMILGSLEVPLPGGSQFSLGNSGGPLIVGLLAGHFKRIGQINIEIPNDILNVFSSLGISLFLSDSGINAGQGIVDILGDYGLQIFIMGMIMTLVTSLLGFALAYLIFKLPVYGALGTTTGAMTSAPSLGALMESSQTDLVVPFYAACQPIATILLVFLPQVLNLIIAAVG

SEQ ID NO: 3867 - DNA, 1128 bp, Alloiococcus otitidis; identical to SEQ ID NO: 3865
  CDS (1)..(1125)

SEQ ID NO: 3868 - protein, 375 aa, Alloiococcus otitidis
MNPLAYLFLIIGLGYLIGSIDIFGIKFGNSAIILVGIVFGHFGAQIPDMVGTLGLVMFIGAVGLKAGKNILYFLKTNGLSFLLIALFVISLSGILSLLFYYMTGIDKDLVMGILSGAMTSTTALATAQEAGAGQLAVIGYGITYIFGVVGIVSLVQVMPKLMGVNQEEEIDKLRPPKNSTGAPSLAGFKQIDKNGLFVFFTTLLLGMILGSLEVPLPGGSQFSLGNSGGPLIVGLLAGHFKRIGQINIEIPNDILNVFSSLGISLFLSDSGINAGQGIVDILGDYGLQIFIMGMIMTLVTSLLGFALAYLIFKLPVYGALGTTTGAMTSAPSLGALMESSQTDLVVPFYAACQPIATILLVFLPQVLNLIIAAVG

SEQ ID NO: 3869 - DNA, 1320 bp, Alloiococcus otitidis
  CDS (25)..(1317)
tcaataggggtgtcccagatgagaatggttgatttaatcgaaaagaaaagagacggtcaggccttaagccaggatgaaatcacctggatggttgaccaatacagcaaggaccaaattaaagactatcaaatgtctgccatgctgatggccatctactttcaagggatgagccacgaggaagccggttacctaactatgtctatggtggaatcaggggaccaaatcgacctgtcccagatcgacgggatcaaagtggacaagcactcaaccggtggagtgggtgacactactaccctcatcctagcccccttggttgccagcttaggtgttccagtggctaaaatgtccggacgggggcttggccataccggaggaaccatagacaagctggaatctatccccggttttcatattgagctgaccagtgaggaatttgtcaaccaggtcaaccagcataaaatcgcccttgtcggccaatccggcaacttaaccccggcagacaagaagctatatgccttaagagatgtgaccgccaccgtcaatgccattcccttgattgcctcttccatcatgtccaagaagattgcagctggcaatgatgccattgttttggatgttaaagtggggtcaggagcttttatgaaagatgaccaggctggagaagacctagcccggaccatggtcaaaatcgggcggtcagtgggccggcaaacgatggctcttgtctccgacatgtctcagcctttaggacgagctattggcaatgccttagaggtgaaagaagccattgatgttttaaaagggaaggggccagaagatttaagagaattagttttggccttggggagccaaatgctggttttggcaaagcaagctaaggacttaaaccaaggcaagcaaaaacttctccaagccattcaatctggtcaggccctagcgaagtttaaagaacttcttgaaatacaaggcggcaacagccaggtggtggaagactccgacctcctgccccaagcaaaataccaaattgacctccctgccttggagagtggctacatctccagcatggtggctgacaagataggccaggcctccatggtcttaggagcaggtcgcaagaagctagatgaccaaattaatccagcggtcggtctaatcctccataaaaagattggagacccagttgaaaaaggcgagccccttttaaccatccacagtgaccaagtccgggtggaagaggtcaaggccctcttatacgacagtatccgtatttccagccaggcccaaaagccgcagcttatccaccaaataatcggttcataa

SEQ ID NO: 3870 - protein, 431 aa, Alloiococcus otitidis
MVDLIEKKRDGQALSQDEITWMVDQYSKDQIKDYQMSAMLMAIYFQGMSHEEAGYLTMSMVESGDQIDLSQIDGIKVDKHSTGGVGDTTTLILAPLVASLGVPVAKMSGRGLGHTGGTIDKLESIPGFHIELTSEEFVNQVNQHKIALVGQSGNLTPADKKLYALRDVTATVNAIPLIASSIMSKKIAAGNDAIVLDVKVGSGAFMKDDQAGEDLARTMVKIGRSVGRQTMALVSDMSQPLGRAIGNALEVKEAIDVLKGKGPEDLRELVLALGSQMLVLAKQAKDLNQGKQKLLQAIQSGQALAKFKELLEIQGGNSQVVEDSDLLPQAKYQIDLPALESGYISSMVADKIGQASMVLGAGRKKLDDQINPAVGLILHKKIGDPVEKGEPLLTIHSDQVRVEEVKALLYDSIRISSQAQKPQLIHQIIGS

SEQ ID NO: 3871 - DNA, 1320 bp, Alloiococcus otitidis; identical to SEQ ID NO: 3869
  CDS (19)..(1317)

SEQ ID NO: 3872 - protein, 433 aa, Alloiococcus otitidis
MRMVDLIEKKRDGQALSQDEITWMVDQYSKDQIKDYQMSAMLMAIYFQGMSHEEAGYLTMSMVESGDQIDLSQIDGIKVDKHSTGGVGDTTTLILAPLVASLGVPVAKMSGRGLGHTGGTIDKLESIPGFHIELTSEEFVNQVNQHKIALVGQSGNLTPADKKLYALRDVTATVNAIPLIASSIMSKKIAAGNDAIVLDVKVGSGAFMKDDQAGEDLARTMVKIGRSVGRQTMALVSDMSQPLGRAIGNALEVKEAIDVLKGKGPEDLRELVLALGSQMLVLAKQAKDLNQGKQKLLQAIQSGQALAKFKELLEIQGGNSQVVEDSDLLPQAKYQIDLPALESGYISSMVADKIGQASMVLGAGRKKLDDQINPAVGLILHKKIGDPVEKGEPLLTIHSDQVRVEEVKALLYDSIRISSQAQKPQLIHQIIGS

SEQ ID NO: 3873 - DNA, 1320 bp, Alloiococcus otitidis; identical to SEQ ID NO: 3869
  CDS (10)..(1317)

SEQ ID NO: 3874 - protein, 436 aa, Alloiococcus otitidis
MSQMRMVDLIEKKRDGQALSQDEITWMVDQYSKDQIKDYQMSAMLMAIYFQGMSHEEAGYLTMSMVESGDQIDLSQIDGIKVDKHSTGGVGDTTTLILAPLVASLGVPVAKMSGRGLGHTGGTIDKLESIPGFHIELTSEEFVNQVNQHKIALVGQSGNLTPADKKLYALRDVTATVNAIPLIASSIMSKKIAAGNDAIVLDVKVGSGAFMKDDQAGEDLARTMVKIGRSVGRQTMALVSDMSQPLGRAIGNALEVKEAIDVLKGKGPEDLRELVLALGSQMLVLAKQAKDLNQGKQKLLQAIQSGQALAKFKELLEIQGGNSQVVEDSDLLPQAKYQIDLPALESGYISSMVADKIGQASMVLGAGRKKLDDQINPAVGLILHKKIGDPVEKGEPLLTIHSDQVRVEEVKALLYDSIRISSQAQKPQLIHQIIGS

SEQ ID NO: 3875 - DNA, 951 bp, Alloiococcus otitidis
  CDS (34)..(948)
gtattgacttcagtccatggaagggagactaaaatgaccagtgtttacattattgccaacccctcttctggccagggcaaggccatccaagctattgctgaactgctcaagttgtttcatgaagagggcttgggtcccttggtcaaattgacccaagaagagtctgatattgcagaatatgcccaaaaagcctgccaggcaaaggttgacctggtggttttggttggtggcgatgggacgatttctcattttatgacggctgtccaagactatgactataaaccagtggtcggcatagtgcctacagggaccatgaacaatatggcccggtccttgaatatcgaccaaaatcccaaaaaggcctgtaagcaagtgttacagaaccaagcacaggccatcgacatgggcttaatcaatggccaagtctttacctcaaccatttctgctggatctgtcccagcctcggccagggaagtcagccaggaagacaaggagcagtacggggcactggcttatatcatcaacggtctccaatcttttagtcaggggcaagatgagtgctacaaggtccttttggatggagttgaagtccagctcaatattgacctcttggtgattggggtggctaattctattgcaggttacactgactttttcaaatcggctacctacaccgatggactcctccatctctttatcctgaaagaagctcccgttgcagaaaaaatttttgccttttccaagctattagcagagccggaccaggcccaagacttgagtcaatttgctcagggtgctgacgtcaactcctatatgacatctttcaaagatatcaagatcgacctcttagacaagggaggccaagtgaccatggatggcaatcccggtccaagctttcccatccacgttgaagtgatcccccaatttatccaggtaattgtgggtgactag

SEQ ID NO: 3876 - protein, 305 aa, Alloiococcus otitidis
MTSVYIIANPSSGQGKAIQAIAELLKLFHEEGLGPLVKLTQEESDIAEYAQKACQAKVDLVVLVGGDGTISHFMTAVQDYDYKPVVGIVPTGTMNNMARSLNIDQNPKKACKQVLQNQAQAIDMGLINGQVFTSTISAGSVPASAREVSQEDKEQYGALAYIINGLQSFSQGQDECYKVLLDGVEVQLNIDLLVIGVANSIAGYTDFFKSATYTDGLLHLFILKEAPVAEKIFAFSKLLAEPDQAQDLSQFAQGADVNSYMTSFKDIKIDLLDKGGQVTMDGNPGPSFPIHVEVIPQFIQVIVGD

SEQ ID NO: 3877 - DNA, 951 bp, Alloiococcus otitidis; identical to SEQ ID NO: 3875
  CDS (4)..(948)

SEQ ID NO: 3878 - protein, 315 aa, Alloiococcus otitidis
MTSVHGRETKMTSVYIIANPSSGQGKAIQAIAELLKLFHEEGLGPLVKLTQEESDIAEYAQKACQAKVDLVVLVGGDGTISHFMTAVQDYDYKPVVGIVPTGTMNNMARSLNIDQNPKKACKQVLQNQAQAIDMGLINGQVFTSTISAGSVPASAREVSQEDKEQYGALAYIINGLQSFSQGQDECYKVLLDGVEVQLNIDLLVIGVANSIAGYTDFFKSATYTDGLLHLFILKEAPVAEKIFAFSKLLAEPDQAQDLSQFAQGADVNSYMTSFKDIKIDLLDKGGQVTMDGNPGPSFPIHVEVIPQFIQVIVGD

SEQ ID NO: 3879 - DNA, 693 bp, Alloiococcus otitidis
  CDS (70)..(690)
attatgacttcctatatatttatggctttggctagtgctataataggacttgtagaaagtggtggaaaaatgcgtcgtaaattaatccgtcgttttgaaaaactggtctttatactagaaatgatcattgttgcctttatcgtgatcggcatcattatcggcatgaccgactttgtttattattttagggaccttatctctgccgaaaccaattcctatgaactgtttgaggcctttttagcttattccttgatcttaattgttggtattgagcttattttaatgctcttataccattcaacccgagctattttagaactgatcctctttgtgattgcccggaaaatgctggtttactcccacaccatgctggacttagttttaggaactttggccatcttgatggtttttgctattttgcgttacttactacccaatgaagccgagcacgacatcgttcgcaaggtagaaaaaacctacctccctaatgtcaaaatggcggatatttttgaggattgggatgaatcctatgactacccacttgatatgaccgtggctgattacatattagaccaaagcaaggaactgggccaaaaagtggaagttacaactgcagttggatataaggacaagcatattgaagttttagaactggatgaagagggcaatatcagccgggtttctgtttactag

SEQ ID NO: 3880 - protein, 207 aa, Alloiococcus otitidis
MRRKLIRRFEKLVFILEMIIVAFIVIGIIIGMTDFVYYFRDLISAETNSYELFEAFLAYSLILIVGIELILMLLYHSTRAILELILFVIARKMLVYSHTMLDLVLGTLAILMVFAILRYLLPNEAEHDIVRKVEKTYLPNVKMADIFEDWDESYDYPLDMTVADYILDQSKELGQKVEVTTAVGYKDKHIEVLELDEEGNISRVSVY

SEQ ID NO: 3881 - DNA, 693 bp, Alloiococcus otitidis; identical to SEQ ID NO: 3879
  CDS (4)..(690)

SEQ ID NO: 3882 - protein, 229 aa, Alloiococcus otitidis
MTSYIFMALASAIIGLVESGGKMRRKLIRRFEKLVFILEMIIVAFIVIGIIIGMTDFVYYFRDLISAETNSYELFEAFLAYSLILIVGIELILMLLYHSTRAILELILFVIARKMLVYSHTMLDLVLGTLAILMVFAILRYLLPNEAEHDIVRKVEKTYLPNVKMADIFEDWDESYDYPLDMTVADYILDQSKELGQKVEVTTAVGYKDKHIEVLELDEEGNISRVSVY

SEQ ID NO: 3883 - DNA, 915 bp, Alloiococcus otitidis
  CDS (16)..(912)
aaaagaaggtatagtatggatatcaagcaattgagatattttatagaagtagctgaaaccaagaatttatcccgggctgctgaaaacctgaatatttctcaacctaccttgtccctgtcgatgaaaaaaatagagcacgatttaaacgttgacttatttgataaaaaagcccggtatgtcctgaccaagcctggtgaaatcctgtatagaagaggtttgaccattgtcaaagacttcgacgatttaatccgggaagtatccaattatgatgaaaaaatcaataaatcctttaaactgggtgttaccatgctttttgccgttatttttatgaaggaaatctcggcctttatcaccaagcacccctccattaatttaaatatagtccagggtgggtcactttccttgcaagaaaaactcctagatgacgatattgatgtgggtattttgtcctaccccaactattaccccaatgaaattgaaatccaaaccgtcaagacagcctgcaaagaataccaggtttcggtcgtcatgtcagagtctcatccactggcccaaaaagaccggctccgcttccaagatttgaaagactatgagttctcaagctttagtgaccactttactgttggcaactttttaaaaaaccggagtaaggagctcggctttaaagctaagatcgtctttaccaatgatgacttatacgctattttggaccatattgccagcaaaaaatccctctgccttttgcctcaaggttaccaaaagtgggtagatgatcctaacttaaaatggattccgttagatgatgattccaaccatttttcagttggtgtagctcggagccgcaagcatgctgattcagaaattttagatgactttatcaaagaaatgactggccaagcccaactcatcaagtaa

SEQ ID NO: 3884 - protein, 299 aa, Alloiococcus otitidis
MDIKQLRYFIEVAETKNLSRAAENLNISQPTLSLSMKKIEHDLNVDLFDKKARYVLTKPGEILYRRGLTIVKDFDDLIREVSNYDEKINKSFKLGVTMLFAVIFMKEISAFITKHPSINLNIVQGGSLSLQEKLLDDDIDVGILSYPNYYPNEIEIQTVKTACKEYQVSVVMSESHPLAQKDRLRFQDLKDYEFSSFSDHFTVGNFLKNRSKELGFKAKIVFTNDDLYAILDHIASKKSLCLLPQGYQKWVDDPNLKWIPLDDDSNHFSVGVARSRKHADSEILDDFIKEMTGQAQLIK

SEQ ID NO: 3885 - DNA, 558 bp, Alloiococcus otitidis
  CDS (91)..(555)
cttgtttatctgcttgatctacattataatgattatagattaaatgaaacgaaaacatttgatctaaaatcttataggaggaattattttatgtcagacaatgtaaaagaaatactcaaccaagttgtggcaacccagggacttctttacaccaaacttcaccaataccactggtatgttaaaggtcctcaattcttctccctacacgaagaatacgaagatctttacaaaaaaacagctgaagactttgatgaagtagcagaacgtttgcttattattggtggccatccatacgctaccctcaaagagtttattgacaactctatcatcgaagaaaacactgcaaacactaaacttggtgaagaagaaacagtccgtgcttcagtgaaagacttgaaagcttacactgacttgcttgataaagctgtcaaattaactgatgaagaaggcgacgatgtatccaacgacttgttaattgctgtgaaaacagacgttgacgaagctatttggatgctacaagctttcttaggcaacgaagcgacagaccaagttaactaa

SEQ ID NO: 3886 - protein, 155 aa, Alloiococcus otitidis
MSDNVKEILNQVVATQGLLYTKLHQYHWYVKGPQFFSLHEEYEDLYKKTAEDFDEVAERLLIIGGHPYATLKEFIDNSIIEENTANTKLGEEETVRASVKDLKAYTDLLDKAVKLTDEEGDDVSNDLLIAVKTDVDEAIWMLQAFLGNEATDQVN

SEQ ID NO: 3887 - DNA, 1971 bp, Alloiococcus otitidis
  CDS (1291)..(1968)
tcatgtcaattagagagaagatttacaatgaagaaacgatttgcacaacttgacagtttaagactcttggccttgatctttattatcttctatcactttgtcccccacatctaccggggagggtttttgggagttaatatcttccttgtctcggccggttacctcaacggttcccagattaacaaggtctttaaccaggagtatacttcctttcccttctggcaaaagctcaaaaggctcctagctaaactctataagcccttactcttgtttatcgggttgatcgccacttttttactagttttttaccaagacctcctgaccaattggttttcccaaattgcttctagcctcctctttgtcaacaactgggttcagattatccaaggagcttcttactttgatgaaattatccaaccttctgtcttgacccacttttggtacttaagcctctacgtccagtttatcctcttcttttggctattgttaaagatctttcgccccttcattaaaaaccggcaaaactttatcctcctaataacgacactaaccctgatcagtgctcttttgatggccttcaacttccaacctggcagtgacccaacccgagtttactatgggtctgacacccggttcttttcctttgggattggccttattgccagccaactatccctcgaccagataaaccagaccaagctcttccaaaaatacgggcagctggtccaaatagccttgtttggggccctgcttgctatgctttttgaaatgaccaatgtgggaacttttacctattatggtggcatggtcctatttgacctggtctttgtcagtttgattgtcagtctagccagtaagtatggcctcttctcccgccttttgacctttaaacccctggccttcttaggccaacactcgcttggcgtttacttgtggtattaccccatctttattttatcccagcgattagcttacgacctaccgggctggctgcaaaatatgaccggccaagttatcatcatttttatcctaggactcttaactgactttgccaccactagcaagtggctcacttggccaagctggtccaagctcctacacttgcccggtaatattaaagacagattccagtcctacctcaaccaacttccctccaagcaaaaagtcttagctggcctgcaagccctcttactgactactaccttgctttccttcctcttctcgacttctaacgacgaagcccaacgttacaaagaagaatatgcccagtccactaaaagtaaccaagacttgggacaggcccaaagtgagcaaaaccaagaccaggaaagttcagaacaagaccaagaccctgaaagttcagaaaatgaaggagaaaatccacaagaaaaccaagaagaatttgatgtagacgattatatcgataacttaaatgaagaccaggccttctacactgagtaccttagcaaggatgagcttagccaaaccatcaacctccaggcaagctttatcggcgattccattatgttgggggcgtcagccggtctcaataccgtctacccttcctcttatgtcaatgctgaagtgggccgacaattatataattccactccccttatcgcttcgctcaaagaccagggcctgctcagtccattagtcgtcattgctttaggatcgaacgggaattttaccaatgaccagtttaaccagtttatcgaaaactttggcccagatgcagagctctactttgtcaatacccatgtcaaccggccttggcgggattccgtcaataccatgcttcaaaataaggcagaagaatttgaccaggtccacgtgatcgattggttttcctactaccaaaacatcgaccaggatattttagataccgacgacatccacctaaaccctgaaggcagacgacactgggtcacctgtatcaccaaggctttgattgaagacctggctgattag

SEQ ID NO: 3888 - protein, 226 aa, Alloiococcus otitidis
MGQAQSEQNQDQESSEQDQDPESSENEGENPQENQEEFDVDDYIDNLNEDQAFYTEYLSKDELSQTINLQASFIGDSIMLGASAGLNTVYPSSYVNAEVGRQLYNSTPLIASLKDQGLLSPLVVIALGSNGNFTNDQFNQFIENFGPDAELYFVNTHVNRPWRDSVNTMLQNKAEEFDQVHVIDWFSYYQNIDQDILDTDDIHLNPEGRRHWVTCITKALIEDLAD

SEQ ID NO: 3889 - DNA, 1971 bp, Alloiococcus otitidis; identical to SEQ ID NO: 3887
  CDS (484)..(1968)

SEQ ID NO: 3890 - protein, 495 aa, Alloiococcus otitidis
MLKIFRPFIKNRQNFILLITTLTLISALLMAFNFQPGSDPTRVYYGSDTRFFSFGIGLIASQLSLDQINQTKLFQKYGQLVQIALFGALLAMLFEMTNVGTFTYYGGMVLFDLVFVSLIVSLASKYGLFSRLLTFKPLAFLGQHSLGVYLWYYPIFILSQRLAYDLPGWLQNMTGQVIIIFILGLLTDFATTSKWLTWPSWSKLLHLPGNIKDRFQSYLNQLPSKQKVLAGLQALLLTTTLLSFLFSTSNDEAQRYKEEYAQSTKSNQDLGQAQSEQNQDQESSEQDQDPESSENEGENPQENQEEFDVDDYIDNLNEDQAFYTEYLSKDELSQTINLQASFIGDSIMLGASAGLNTVYPSSYVNAEVGRQLYNSTPLIASLKDQGLLSPLVVIALGSNGNFTNDQFNQFIENFGPDAELYFVNTHVNRPWRDSVNTMLQNKAEEFDQVHVIDWFSYYQNIDQDILDTDDIHLNPEGRRHWVTCITKALIEDLAD

SEQ ID NO: 3891 - DNA, 1971 bp, Alloiococcus otitidis; identical to SEQ ID NO: 3887
  CDS (427)..(1968)

SEQ ID NO: 3892 - protein, 514 aa, Alloiococcus otitidis
MTHFWYLSLYVQFILFFWLLLKIFRPFIKNRQNFILLITTLTLISALLMAFNFQPGSDPTRVYYGSDTRFFSFGIGLIASQLSLDQINQTKLFQKYGQLVQIALFGALLAMLFEMTNVGTFTYYGGMVLFDLVFVSLIVSLASKYGLFSRLLTFKPLAFLGQHSLGVYLWYYPIFILSQRLAYDLPGWLQNMTGQVIIIFILGLLTDFATTSKWLTWPSWSKLLHLPGNIKDRFQSYLNQLPSKQKVLAGLQALLLTTTLLSFLFSTSNDEAQRYKEEYAQSTKSNQDLGQAQSEQNQDQESSEQDQDPESSENEGENPQENQEEFDVDDYIDNLNEDQAFYTEYLSKDELSQTINLQASFIGDSIMLGASAGLNTVYPSSYVNAEVGRQLYNSTPLIASLKDQGLLSPLVVIALGSNGNFTNDQFNQFIENFGPDAELYFVNTHVNRPWRDSVNTMLQNKAEEFDQVHVIDWFSYYQNIDQDILDTDDIHLNPEGRRHWVTCITKALIEDLAD

SEQ ID NO: 3893 - DNA, 1971 bp, Alloiococcus otitidis; identical to SEQ ID NO: 3887
  CDS (28)..(1968)

SEQ ID NO: 3894 - protein, 647 aa, Alloiococcus otitidis
MKKRFAQLDSLRLLALIFIIFYHFVPHIYRGGFLGVNIFLVSAGYLNGSQINKVFNQEYTSFPFWQKLKRLLAKLYKPLLLFIGLIATFLLVFYQDLLTNWFSQIASSLLFVNNWVQIIQGASYFDEIIQPSVLTHFWYLSLYVQFILFFWLLLKIFRPFIKNRQNFILLITTLTLISALLMAFNFQPGSDPTRVYYGSDTRFFSFGIGLIASQLSLDQINQTKLFQKYGQLVQIALFGALLAMLFEMTNVGTFTYYGGMVLFDLVFVSLIVSLASKYGLFSRLLTFKPLAFLGQHSLGVYLWYYPIFILSQRLAYDLPGWLQNMTGQVIIIFILGLLTDFATTSKWLTWPSWSKLLHLPGNIKDRFQSYLNQLPSKQKVLAGLQALLLTTTLLSFLFSTSNDEAQRYKEEYAQSTKSNQDLGQAQSEQNQDQESSEQDQDPESSENEGENPQENQEEFDVDDYIDNLNEDQAFYTEYLSKDELSQTINLQASFIGDSIMLGASAGLNTVYPSSYVNAEVGRQLYNSTPLIASLKDQGLLSPLVVIALGSNGNFTNDQFNQFIENFGPDAELYFVNTHVNRPWRDSVNTMLQNKAEEFDQVHVIDWFSYYQNIDQDILDTDDIHLNPEGRRHWVTCITKALIEDLAD

SEQ ID NO: 3895 - DNA, 225 bp, Alloiococcus otitidis
  CDS (1)..(222)
atgaagaccaggccttctacactgagtaccttagcaaggatgagcttagccaaaccatcaacctccaggcaagctttatcggcgattccattatgttgggggcgtcagccggtctcaataccgtctacccttcctcttatgtcaatgctgaagtgggccgacaattatataattccactccccttatcgcttcgctcaaagaccagggcctgctcagtccattag

SEQ ID NO: 3896 - protein, 74 aa, Alloiococcus otitidis
MKTRPSTLSTLARMSLAKPSTSRQALSAIPLCWGRQPVSIPSTLPLMSMLKWADNYIIPLPLSLRSKTRACSVH

SEQ ID NO: 3897 - DNA, 411 bp, Alloiococcus otitidis
  CDS (4)..(408)
tggatgattcgggttaacacagatgcagcctataatccaaaaaataaaaaagctggcttagggattgtcatcaccggtcccggcttccatgagcaaatagccatccccttggaaactagcccaaataaccacacggcggaattccaagccttgatttatgccctgaattggttggttgaccatgacttaaccagccagatggtctttgttgcttgtgatagtaaagcgcttacccaagttattcacaatgaagggtccaaaaatgaagcctatcagaaatatctggaaagtattttagccttaagggaaaacttccagctgattacctttgactgggtccccgaaagtcaaaacaagggagcagacaacctagccaagcaggccctcagaaaggctcaaaaagatacataa

SEQ ID NO: 3898 - protein, 135 aa, Alloiococcus otitidis
MIRVNTDAAYNPKNKKAGLGIVITGPGFHEQIAIPLETSPNNHTAEFQALIYALNWLVDHDLTSQMVFVACDSKALTQVIHNEGSKNEAYQKYLESILALRENFQLITFDWVPESQNKGADNLAKQALRKAQKDT

SEQ ID NO: 3899 - DNA, 1920 bp, Alloiococcus otitidis
  CDS (43)..(1917)
ctatgtatagaaagtgtgacagcagtgaaagagtttaaagtcatgaacttaagccaatccattggaagcaagaccttgtttaaggacatcaacctctccattaaagaccaagaccgatatggcttgattgggatcaatggggtcggcaagtccagctttctaaataccctggtaggggacttggcctttgatgcaggagaaatcaaaaaggctaaggactataccatttcctatcttaagcaaagaccttctttagatccggaccagactgttctgcaggtggtttaccagggggacaacaaggtgatgaacactgttcgtcagtatgaagaggccttggccaaactcaaccaagacccattgaaggaaagttaccaaaaggactttgaacaagcagaagctgccatgaaccgagaagatgcttggaatgctaattctaaagccaattccatcttgaccaagttgggcattgaagatatggatgaaacaatcggtaacctgtcaggtggtcaagaaaaaagggtggccctagcccaggtcttgattcaagaatcggaccttttgattttagatgagccgaccaaccacctagactaccaaatgatcgattggttgtctaaatacctcagcaattaccctggggccattctcttggtgacccacgatcgctactttttggatgaagtggcgaatgcgattattgaactggaagaccaaactctctacacctaccccggcaactaccaggcctatgtccaacagaaagcagaaagagaggctttagaagccagccaagcacataaaaacaaacagttatataagaaagaactggcctggatgagggaaggagtccaagcaagggggaccaagcaacaagcccggattaaccgctttgaagaattaaaagagggcgttaaaggccaatctgaggaagaaagtctagagcttaatttggatagtgtccggattggtaaaaaggttcttgagtttgaccaagcctcctaccagataggagggcaaaaaatcctggatgattttgacctgattatccaaaatgccgaccgtattggggtgacaggggccaatggggcgggtaagtcaaccttcctcaacctcctcacccaacgactagacttggatagcggtagcctagaccagggagagacggtccgaatagcttactatacccaacaaaatgaaggcttggatgacagtaaacgggtgattgactatatgcgggagacagcagaggaggtctacctggctgaccaatccaaggttagtgtggcccaattattggagcggttcatgttcccccggtccaagcaggccacctatatttctagtttatctggtggggaaaaacgccggctttacttgatccagcttttgatgcaaagacccaatgttttggttttagacgagccaactaatgacttagacattaagaccttaactatcttggaggattatattgataactttgtgggtgcagtaattactgtttcccacgatcgctacttcctagacaaggtagccgacaagttactagtctttaagggtcaaggggagattgaaacgtattacgggtccatgacctcctaccttgaccggcaaaaacaagcccaaaaagaccaggctaaagacacggacaagtccaaaaaaagtaaagataagcctcaaactagtagtctaagcaaggagaaaactcggcttaactaccatgaacaaaaagaatgggataaaattgaagacgagattagcgctttagaggatcagttggaagccattgaagaggaaatgcttgagcaagccagtgattatggtaaactgaatgagttaaataaccaaaaagagaaccttgaacaagaactagacgaaaaattagaacgttgggaatatttaagccaatatgtatag

SEQ ID NO: 3900 - protein, 625 aa, Alloiococcus otitidis
MNLSQSIGSKTLFKDINLSIKDQDRYGLIGINGVGKSSFLNTLVGDLAFDAGEIKKAKDYTISYLKQRPSLDPDQTVLQVVYQGDNKVMNTVRQYEEALAKLNQDPLKESYQKDFEQAEAAMNREDAWNANSKANSILTKLGIEDMDETIGNLSGGQEKRVALAQVLIQESDLLILDEPTNHLDYQMIDWLSKYLSNYPGAILLVTHDRYFLDEVANAIIELEDQTLYTYPGNYQAYVQQKAEREALEASQAHKNKQLYKKELAWMREGVQARGTKQQARINRFEELKEGVKGQSEEESLELNLDSVRIGKKVLEFDQASYQIGGQKILDDFDLIIQNADRIGVTGANGAGKSTFLNLLTQRLDLDSGSLDQGETVRIAYYTQQNEGLDDSKRVIDYMRETAEEVYLADQSKVSVAQLLERFMFPRSKQATYISSLSGGEKRRLYLIQLLMQRPNVLVLDEPTNDLDIKTLTILEDYIDNFVGAVITVSHDRYFLDKVADKLLVFKGQGEIETYYGSMTSYLDRQKQAQKDQAKDTDKSKKSKDKPQTSSLSKEKTRLNYHEQKEWDKIEDEISALEDQLEAIEEEMLEQASDYGKLNELNNQKENLEQELDEKLERWEYLSQYV

SEQ ID NO: 3901 - DNA, 1920 bp, Alloiococcus otitidis; identical to SEQ ID NO: 3899
  CDS (16)..(1917)

SEQ ID NO: 3902 - protein, 634 aa, Alloiococcus otitidis
MTAVKEFKVMNLSQSIGSKTLFKDINLSIKDQDRYGLIGINGVGKSSFLNTLVGDLAFDAGEIKKAKDYTISYLKQRPSLDPDQTVLQVVYQGDNKVMNTVRQYEEALAKLNQDPLKESYQKDFEQAEAAMNREDAWNANSKANSILTKLGIEDMDETIGNLSGGQEKRVALAQVLIQESDLLILDEPTNHLDYQMIDWLSKYLSNYPGAILLVTHDRYFLDEVANAIIELEDQTLYTYPGNYQAYVQQKAEREALEASQAHKNKQLYKKELAWMREGVQARGTKQQARINRFEELKEGVKGQSEEESLELNLDSVRIGKKVLEFDQASYQIGGQKILDDFDLIIQNADRIGVTGANGAGKSTFLNLLTQRLDLDSGSLDQGETVRIAYYTQQNEGLDDSKRVIDYMRETAEEVYLADQSKVSVAQLLERFMFPRSKQATYISSLSGGEKRRLYLIQLLMQRPNVLVLDEPTNDLDIKTLTILEDYIDNFVGAVITVSHDRYFLDKVADKLLVFKGQGEIETYYGSMTSYLDRQKQAQKDQAKDTDKSKKSKDKPQTSSLSKEKTRLNYHEQKEWDKIEDEISALEDQLEAIEEEMLEQASDYGKLNELNNQKENLEQELDEKLERWEYLSQYV

SEQ ID NO: 3903 - DNA, 381 bp, Alloiococcus otitidis
  CDS (148)..(378)
ttgctggaattctataataacatctgggtgctgaaaatccactcattcacaatccgattgtccatttttaactcaaaaagtagtgatcccattacaccagcaaaatcaaaaaagaaccggcagttcattacaaaacgagccggtcctttggtcttattttcttctgtattcataaatggtgtgggagtggttgtgaccgtcagcctggtcataataagctttagacacctgattaaagctgtcccagtcaatgtctggcatggtggtgtcaccatcaaagctctcgtggataactgtttggtggagaacatcaacttggtccagaaacaagtcgaaaatgccggccccaccaatcacatagaggtccaccccatgacctga

SEQ ID NO: 3904 - protein, 77 aa, Alloiococcus otitidis
MVLFSSVFINGVGVVVTVSLVIISFRHLIKAVPVNVWHGGVTIKALVDNCLVENINLVQKQVENAGPTNHIEVHPMT

SEQ ID NO: 3905 - DNA, 561 bp, Alloiococcus otitidis
  CDS (67)..(558)
acaagaactagacgaaaaattagaacgttgggaatatttaagccaatatgtataggagagataactatgatagcctacgtttgggcccaagatgagcaaggaatcattggtaaagacaaggttttgccttgggaattgtccaatgacttaaagcattttaaaaaagttacagaaggtcacaccatcctgatgggccggaagacctttgaaggaatggataaaaagcccctccctaaccgaaaaaccttggtattgacccgccaagatgactaccaagctggggacgaccaggttgaagtcgtccactccaaagaccaggccttgacttatgcgtcaggtcatggggtggacctctatgtgattggtggggccggcattttcgacttgtttctggaccaagttgatgttctccaccaaacagttatccacgagagctttgatggtgacaccaccatgccagacattgactgggacagctttaatcaggtgtctaaagcttattatgaccaggctgacggtcacaaccactcccacaccatttatgaatacagaagaaaataa

SEQ ID NO: 3906 - protein, 164 aa, Alloiococcus otitidis
MIAYVWAQDEQGIIGKDKVLPWELSNDLKHFKKVTEGHTILMGRKTFEGMDKKPLPNRKTLVLTRQDDYQAGDDQVEVVHSKDQALTYASGHGVDLYVIGGAGIFDLFLDQVDVLHQTVIHESFDGDTTMPDIDWDSFNQVSKAYYDQADGHNHSHTIYEYRRK

SEQ ID NO: 3907 - DNA, 561 bp, Alloiococcus otitidis; identical to SEQ ID NO: 3905
  CDS (28)..(558)

SEQ ID NO: 3908 - protein, 177 aa, Alloiococcus otitidis
MGIFKPICIGEITMIAYVWAQDEQGIIGKDKVLPWELSNDLKHFKKVTEGHTILMGRKTFEGMDKKPLPNRKTLVLTRQDDYQAGDDQVEVVHSKDQALTYASGHGVDLYVIGGAGIFDLFLDQVDVLHQTVIHESFDGDTTMPDIDWDSFNQVSKAYYDQADGHNHSHTIYEYRRK

SEQ ID NO: 3909 - DNA, 342 bp, Alloiococcus otitidis
  CDS (181)..(339)
ttggtggggccggcattttcgacttgtttctggaccaagttgatgttctccaccaaacagttatccacgagagctttgatggtgacaccaccatgccagacattgactgggacagctttaatcaggtgtctaaagcttattatgaccaggctgacggtcacaaccactcccacaccatttatgaatacagaagaaaataagaccaaaggaccggctcgttttgtaatgaactgccggttcttttttgattttgctggtgtaatgggatcactactttttgagttaaaaatggacaatcggattgtgaatgagtggattttcagcacccagatgttattatag

SEQ ID NO: 3910 - protein, 53 aa, Alloiococcus otitidis
MNTEENKTKGPARFVMNCRFFFDFAGVMGSLLFELKMDNRIVNEWIFSTQMLL

SEQ ID NO: 3911 - DNA, 687 bp, Alloiococcus otitidis
  CDS (178)..(684)
ttaacttaccatattataccagaatcggagggagtcaaactggaaaaaggacggaatgtatcaaaacgatacctcattgtgaacgaaatactgaatgcttccactcacggacttgctgctatcttaagtattgtgggcctgattttccttatatacaaggcaattggccgagacagcatggcccaattagtggcctacagcgtctacggagcatctttaatcctgctttacttaagctctaccttttaccatatattcaagttcacgaaaattagggaagtcatgcaacgtttagaccatgccaccatctttgtcttgattgcaggaagttatacgccttacacggttgtcgtcattggtggttgggtgggggccattgccactgctatcatatggttgattgccttgtttggtgtcttgtataaaacattttggttcaaccgcttcaccaacctgtcaacctggctctatatcggcatgggttggatctccctatttttaatctaccacctctttcaagggatgggctggcgaggaattgcttggctggttgccggtggagtagcctttacggttggaaccctcttttaccaactaaagaaagttaaatttatgcatgtagtttggcacctctttgtcatgctaggaaccacttgtatgtttatttctatctaccattacatttaa

SEQ ID NO: 3912 - protein, 169 aa, Alloiococcus otitidis
MAQLVAYSVYGASLILLYLSSTFYHIFKFTKIREVMQRLDHATIFVLIAGSYTPYTVVVIGGWVGAIATAIIWLIALFGVLYKTFWFNRFTNLSTWLYIGMGWISLFLIYHLFQGMGWRGIAWLVAGGVAFTVGTLFYQLKKVKFMHVVWHLFVMLGTTCMFISIYHYI

SEQ ID NO: 3913 - DNA, 687 bp, Alloiococcus otitidis; identical to SEQ ID NO: 3911
  CDS (79)..(684)

SEQ ID NO: 3914 - protein, 202 aa, Alloiococcus otitidis
MNEILNASTHGLAAILSIVGLIFLIYKAIGRDSMAQLVAYSVYGASLILLYLSSTFYHIFKFTKIREVMQRLDHATIFVLIAGSYTPYTVVVIGGWVGAIATAIIWLIALFGVLYKTFWFNRFTNLSTWLYIGMGWISLFLIYHLFQGMGWRGIAWLVAGGVAFTVGTLFYQLKKVKFMHVVWHLFVMLGTTCMFISIYHYI

SEQ ID NO: 3915 - DNA, 663 bp, Alloiococcus otitidis
  CDS (19)..(660)
aaagaaagggaaattgagatgacagatgaagaaaaaagaagccaggccaagcctaagaaagcttcctcaaatatttggaaaattttattctttgccttgttagtgatcaccttgttccccttggttttctttttctttgggccttcaggaaaccaagggccaagtgagttagaccgatcgctagatccaggagacttggcgattgacctggccctaacttttgaggacgttgaaagtatggctaacagctttatccaagccaaccaaccagaccaagacctggatttaaggcttagccttgaccaggacttggaactggctggccagacatcttacttaggctttgacctgccctttcaatctagcctatcgcctcaagtcacggacaatgggaacgtggtctttcaagttgataacctgaccttaagagggtttgacctgcccaagtccttagtactaggcctccttgacagccaaattgacctgcctgactttatagcctttattcctagccaaggccaaattgccatcaatctaacagactttcaactggataacggagggcagttgagagttgcggactgggaccaggctaaccggatcttgacagtcacgattattttaccgacagaggtccttggtccagataacaatagcgattaa

SEQ ID NO: 3916 - protein, 214 aa, Alloiococcus otitidis
MTDEEKRSQAKPKKASSNIWKILFFALLVITLFPLVFFFFGPSGNQGPSELDRSLDPGDLAIDLALTFEDVESMANSFIQANQPDQDLDLRLSLDQDLELAGQTSYLGFDLPFQSSLSPQVTDNGNVVFQVDNLTLRGFDLPKSLVLGLLDSQIDLPDFIAFIPSQGQIAINLTDFQLDNGGQLRVADWDQANRILTVTIILPTEVLGPDNNSD

SEQ ID NO: 3917 - DNA, 279 bp, Alloiococcus otitidis
  CDS (37)..(276)
gggcaagatcctgcctatcacgaggccaaggggaggatggataaaattatgcgtgaatctttctaccattatatgcgtcaattacgggaccccaaccgcaatgatgaactgacccagctagcctatgccattagtgaagacggcatgttccctaaaacctctactgattacgatgatattagccggtatttggaactagaagtaaattacgtacctaggatggacctttttgacaaggcctgggctaaatatcttgaagacaaggctgaccaagactaa

SEQ ID NO: 3918 - protein, 80 aa, Alloiococcus otitidis
MDKIMRESFYHYMRQLRDPNRNDELTQLAYAISEDGMFPKTSTDYDDISRYLELEVNYVPRMDLFDKAWAKYLEDKADQD

SEQ ID NO: 3919 - DNA, 747 bp, Alloiococcus otitidis
  CDS (31)..(744)
atcgactcaaatataaaaaggagaaatgagatgcctacaccacatttagaagccaagccaggtgacattgctgaaattgttctactaccgggagatccactgcgggccaagtatatcgctgacacttttttacaggatgtgacccaatataattccgtccgtaatgccttggggtttaccggaacctataagggacttaaaatttcagtccagggaactggtatgggcatgccttctgctatgatttacacagaagaactcgtgcgagaatacggggctaaagtcttaatccggattggatcagctggtggaatgaaagaagatgttcaaattcgcgatgtcgtcttaggccaagctgccacaacagacgccagtctccaccgcaatattttccacaaccaggtcgactatgctcccatcgcagactttggcctcttaaaaactgcttatgaagtgggtgaggaaagaggctttccgatcaaggtagggaacatcttgtcttctgaccgtttttacaatgatgagcttgacatgaaaaaattagctgattacggggtcatggctgtagaaatggaagcggctggtatttactcagtagcggccaaacacaaggtaaagaccttaaccattctaactatctctgaccacatcttaactggagaagagaccagctcagaagaaagacagactagtttcgaagacatgatggttgttgccttggaaacggccttgcaaacggaactttag

SEQ ID NO: 3920 - protein, 238 aa, Alloiococcus otitidis
MPTPHLEAKPGDIAEIVLLPGDPLRAKYIADTFLQDVTQYNSVRNALGFTGTYKGLKISVQGTGMGMPSAMIYTEELVREYGAKVLIRIGSAGGMKEDVQIRDVVLGQAATTDASLHRNIFHNQVDYAPIADFGLLKTAYEVGEERGFPIKVGNILSSDRFYNDELDMKKLADYGVMAVEMEAAGIYSVAAKHKVKTLTILTISDHILTGEETSSEERQTSFEDMMVVALETALQTEL

SEQ ID NO: 3921 - DNA, 1488 bp, Alloiococcus otitidis
  CDS (148)..(1485)
gagaaagaaggaggtttgacggtgtctgatcaaaataacagaaatggcgtatcttttttgacttatatcttgtctttgctcgccatttttatcatcggagtctttttgacccttgtcttaactggtcgaactcgtcaacccaatctgatgtcttcttcttcaagcgaccaagctgaagaagaaaacatctctttggatactgtagcagaactttaccaggttttaacccaagagtattatggggatgtcgactcgaaggccttaattaatggggcactggaaggcatggcccaagctgtggatgaccctcatacccagtacatggatgtccaagagacatctgactttaacgatgaaatttctggatcttttgaagggatcggggccgaagttatcaaggaagacgaaaaacttcgggtggtttctcccataccggattcgccggctgaccaagctgggatcttgcctaacgactacatacttgcagttgacggccagtccctaaaagacttgaatgcccaggaggccgttgaattaattcggggtccaaaagggagtgaagtcgacttagaagttgaacgttcaggcaacagctttaacctgaccgttgagcgggatgccgttcccattgaaacggtgacttaccaagaagtagaaggtcatgacggtataggtctcgtccaactttcccggtttaaccagcctagctatgaagaaatggtagaagccatccaagacctagaagaccaaggtgtcacccaatttatctttgacttacgggggaacccaggtggactgctagataccgccttacaaatcgccaatatctttgttgatgaaggcgaccctattatgcaagttaaggaagctgaagacgaagaccctatcagctttgtagcaggggatgagtatggtgactttaaatttaacccagaccatgaagccatcttcctagtcgatgaaggttcggcttctgcttcagaaatcctagcaggggctgtccaagaagctggctatcctcttttaggtaaaacaacttatggcaaggggaccgtccagtccctctaccccttaattggtggttctgaagtgaaatttactaaccacatttggttgaccgcttcaggtgagtggatcaatgaagaaggaattgagccagacattgaagttgaccagctgggccaaggggagcttaaattggtcaaccccgaagagacctaccagttaggtgaccaatctcctgaagtagaaaacatcaacaagctcttgtcacttttgggttatgaggtgccggacaatgatcagtttaatcaagaaacccaagtggctgtccaaaccttccaaaatgaccagggcttagaagagaccggtgtgatgaatgaaacaacctccatccggctcatggaagccatccgtgaatatataagggaaaatgacaagcaggtggaagaagctattgctaggctagaagcagacaatggcgagtag

SEQ ID NO: 3922 - protein, 446 aa, Alloiococcus otitidis
MSSSSSDQAEEENISLDTVAELYQVLTQEYYGDVDSKALINGALEGMAQAVDDPHTQYMDVQETSDFNDEISGSFEGIGAEVIKEDEKLRVVSPIPDSPADQAGILPNDYILAVDGQSLKDLNAQEAVELIRGPKGSEVDLEVERSGNSFNLTVERDAVPIETVTYQEVEGHDGIGLVQLSRFNQPSYEEMVEAIQDLEDQGVTQFIFDLRGNPGGLLDTALQIANIFVDEGDPIMQVKEAEDEDPISFVAGDEYGDFKFNPDHEAIFLVDEGSASASEILAGAVQEAGYPLLGKTTYGKGTVQSLYPLIGGSEVKFTNHIWLTASGEWINEEGIEPDIEVDQLGQGELKLVNPEETYQLGDQSPEVENINKLLSLLGYEVPDNDQFNQETQVAVQTFQNDQGLEETGVMNETTSIRLMEAIREYIRENDKQVEEAIARLEADNGE

SEQ ID NO: 3923 - DNA, 1488 bp, Alloiococcus otitidis; identical to SEQ ID NO: 3921
  CDS (22)..(1485)

SEQ ID NO: 3924 - protein, 488 aa, Alloiococcus otitidis
MSDQNNRNGVSFLTYILSLLAIFIIGVFLTLVLTGRTRQPNLMSSSSSDQAEEENISLDTVAELYQVLTQEYYGDVDSKALINGALEGMAQAVDDPHTQYMDVQETSDFNDEISGSFEGIGAEVIKEDEKLRVVSPIPDSPADQAGILPNDYILAVDGQSLKDLNAQEAVELIRGPKGSEVDLEVERSGNSFNLTVERDAVPIETVTYQEVEGHDGIGLVQLSRFNQPSYEEMVEAIQDLEDQGVTQFIFDLRGNPGGLLDTALQIANIFVDEGDPIMQVKEAEDEDPISFVAGDEYGDFKFNPDHEAIFLVDEGSASASEILAGAVQEAGYPLLGKTTYGKGTVQSLYPLIGGSEVKFTNHIWLTASGEWINEEGIEPDIEVDQLGQGELKLVNPEETYQLGDQSPEVENINKLLSLLGYEVPDNDQFNQETQVAVQTFQNDQGLEETGVMNETTSIRLMEAIREYIRENDKQVEEAIARLEADNGE

SEQ ID NO: 3925 - DNA, 1488 bp, Alloiococcus otitidis; identical to SEQ ID NO: 3921
  CDS (16)..(1485)

SEQ ID NO: 3926 - protein, 490 aa, Alloiococcus otitidis
MTVSDQNNRNGVSFLTYILSLLAIFIIGVFLTLVLTGRTRQPNLMSSSSSDQAEEENISLDTVAELYQVLTQEYYGDVDSKALINGALEGMAQAVDDPHTQYMDVQETSDFNDEISGSFEGIGAEVIKEDEKLRVVSPIPDSPADQAGILPNDYILAVDGQSLKDLNAQEAVELIRGPKGSEVDLEVERSGNSFNLTVERDAVPIETVTYQEVEGHDGIGLVQLSRFNQPSYEEMVEAIQDLEDQGVTQFIFDLRGNPGGLLDTALQIANIFVDEGDPIMQVKEAEDEDPISFVAGDEYGDFKFNPDHEAIFLVDEGSASASEILAGAVQEAGYPLLGKTTYGKGTVQSLYPLIGGSEVKFTNHIWLTASGEWINEEGIEPDIEVDQLGQGELKLVNPEETYQLGDQSPEVENINKLLSLLGYEVPDNDQFNQETQVAVQTFQNDQGLEETGVMNETTSIRLMEAIREYIRENDKQVEEAIARLEADNGE

SEQ ID NO: 3927 - DNA, 627 bp, Alloiococcus otitidis
  CDS (175)..(624)
aaagttggtgaatcttccttgactaaagatcaatcgcagccagaattggaccaaagaggagaccagggcggggaaggccaaacttcttggttttcagaaattgtctctaccctcctttatattcttatttttacgggaatcttcttcttgattcagcaatttctttttgtcgttgtgagtgtggatggccagtccatgtacccaaccttggaaaacaacgaccggctcgtcttaaataaggtccggtccatcgaccgttttgatattgttgtttttcccgccccagatgacccagaccaccaatacatcaagcgggtgattggagtgccaggagacaagatcgaatatatcgaagatgacctctacctcaacggagagcaagtggaagaaccatatttggaccattttgatggtgaggcaaacttcgcttcttatataactggtaatttcagtctggaatccctctttggggttgaaacagtgccagaaggtcaatactttgttttaggggacaaccggcttaattccagggatagtcgaacctttggctttgtcgatgccgataacataacaggagaaaccaggctacaaatatggcccctaagtgactttggttatgtcgattag

SEQ ID NO: 3928 - protein, 150 aa, Alloiococcus otitidis
MSVDGQSMYPTLENNDRLVLNKVRSIDRFDIVVFPAPDDPDHQYIKRVIGVPGDKIEYIEDDLYLNGEQVEEPYLDHFDGEANFASYITGNFSLESLFGVETVPEGQYFVLGDNRLNSRDSRTFGFVDADNITGETRLQIWPLSDFGYVD

SEQ ID NO: 3929 - DNA, 627 bp, Alloiococcus otitidis; identical to SEQ ID NO: 3927
  CDS (19)..(624)

SEQ ID NO: 3930 - protein, 202 aa, Alloiococcus otitidis
MTKDQSQPELDQRGDQGGEGQTSWFSEIVSTLLYILIFTGIFFLIQQFLFVVVSVDGQSMYPTLENNDRLVLNKVRSIDRFDIVVFPAPDDPDHQYIKRVIGVPGDKIEYIEDDLYLNGEQVEEPYLDHFDGEANFASYITGNFSLESLFGVETVPEGQYFVLGDNRLNSRDSRTFGFVDADNITGETRLQIWPLSDFGYVD

SEQ ID NO: 3931 - DNA, 936 bp, Alloiococcus otitidis
  CDS (91)..(933)
caagagtcagtcttagtagtaaaaagaaagcaaacatcattaaggcctagaccggtgtctgggcctttttattcagaaaggagccgatccatgtcaaccatccaatggtatccgggacatatggccaaggccaagcgggaatttcaggaaaaattgaagttagttgatatcgtcttagaactgcttgatgctaggctaccggagtccagttcgaaccctatgttggaccaaatcatccaggacaagccccggcttaaaattttaatgaaagcagacttggccgaccaaaagcgaaccaaccagtggctcaactactatcaggaccagggcaagccagccatggccttgaacgttaagcacaagcaggatatgaaagatgttaccgaccagatcaaggtggtcttgtcagactggcagaaacaaaggcaagcgaagggccttaaccagcgggcagtcaaagcagtcagtgtcggtatccccaatgtgggcaagtccactttgataaaccgttttgcgggcaaaaatattgcccagactgggaaccggccaggtgttacccaggcccagcaatggattaagtataagggggtcttggaactcttagacacacccggtattctctggcccaagtttgaagaccaagaagttggcaaaaagttagccctaactggggctatcaaggacaaactcttatatatggatgacattgccctctatgctattgacttctttaaagcccactatcctggccggtttgaagaccgctaccaattggctcaaggggctgaaaaagacctttcttcggttgaccttctcttggccattacgggaaaaagaggatttggcgatgactacgaccgggctgccacaatgatcgtcaacgaaattcgcaagggactcctgggaccctttagcctagaccagttaggagactga

SEQ ID NO: 3932 - protein, 281 aa, Alloiococcus otitidis
MSTIQWYPGHMAKAKREFQEKLKLVDIVLELLDARLPESSSNPMLDQIIQDKPRLKILMKADLADQKRTNQWLNYYQDQGKPAMALNVKHKQDMKDVTDQIKVVLSDWQKQRQAKGLNQRAVKAVSVGIPNVGKSTLINRFAGKNIAQTGNRPGVTQAQQWIKYKGVLELLDTPGILWPKFEDQEVGKKLALTGAIKDKLLYMDDIALYAIDFFKAHYPGRFEDRYQLAQGAEKDLSSVDLLLAITGKRGFGDDYDRAATMIVNEIRKGLLGPFSLDQLGD

SEQ ID NO: 3933 - DNA, 936 bp, Alloiococcus otitidis; identical to SEQ ID NO: 3931
  CDS (55)..(933)

SEQ ID NO: 3934 - protein, 293 aa, Alloiococcus otitidis
MSGPFYSERSRSMSTIQWYPGHMAKAKREFQEKLKLVDIVLELLDARLPESSSNPMLDQIIQDKPRLKILMKADLADQKRTNQWLNYYQDQGKPAMALNVKHKQDMKDVTDQIKVVLSDWQKQRQAKGLNQRAVKAVSVGIPNVGKSTLINRFAGKNIAQTGNRPGVTQAQQWIKYKGVLELLDTPGILWPKFEDQEVGKKLALTGAIKDKLLYMDDIALYAIDFFKAHYPGRFEDRYQLAQGAEKDLSSVDLLLAITGKRGFGDDYDRAATMIVNEIRKGLLGPFSLDQLGD

SEQ ID NO: 3935 - DNA, 780 bp, Alloiococcus otitidis
  CDS (7)..(777)
aaaagtatggaaaagcttaccattaaagatatcaaggccaaactaagacagcttgaccatgaaaataactttaccgaaagcctccgtcaagacccgcgcaagggagttcaaaaggctttgaaatcttggggccaatcccggttgagagagaaagaattaatccaggcctaccaggaaaaaaatgccttggaaagtgagcttcgttcccaaggttttcagaccattgccggtttcgatgaggtgggacgggggcccctagccggtccggtggtagcagcagctgttatcttagaccctgaccaggtgatcttaggcttggatgactctaaaaagttatcccagaaaaaaagacaggaactggaccaagctatcaaggccaagtcaaaagactgggctattgggtcagcttccgttcaagagattgaccgatacaatatctaccaggccacccgcttggccatgaaacgtgcccttgatgccttgttgcttaaacctgactacctcctggtagatgacatggtcattgagacgtcacttccccaaaaatccatggtcaagggggataaactcagtaacgcaatagcagccgccagtattgtggccaaacaataccgggaccagcagatgatcgactacagcaaggactacccggactatggcttcgaccatcatgtaggctacggcacccaaatccacctggaagccttgcggaagtatgggcccacccccatccaccgacagtccttccaacctgtccgagatgccagccggagtgactag

SEQ ID NO: 3936 - protein, 257 aa, Alloiococcus otitidis
MEKLTIKDIKAKLRQLDHENNFTESLRQDPRKGVQKALKSWGQSRLREKELIQAYQEKNALESELRSQGFQTIAGFDEVGRGPLAGPVVAAAVILDPDQVILGLDDSKKLSQKKRQELDQAIKAKSKDWAIGSASVQEIDRYNIYQATRLAMKRALDALLLKPDYLLVDDMVIETSLPQKSMVKGDKLSNAIAAASIVAKQYRDQQMIDYSKDYPDYGFDHHVGYGTQIHLEALRKYGPTPIHRQSFQPVRDASRSD

SEQ ID NO: 3937 - DNA, 882 bp, Alloiococcus otitidis
  CDS (10)..(879)
ggtgagaaaatgaaaaatacttggaccttagaccattatctgattttactagctgaatgttcttttttgaccccgaccgacaaatgggccttgcttggctcggtctatcccgaccttattgctgaattggacttgccttggttggctaagatccgactgaactccgaaaaagcaaggcggtttagccactttattgctattagtggccgggatattatcaattcttatgatttagacccagtggaccggcttactttttttgacccaaactatcccgatcctttgcggcacatttatgccccgcccctccttttatattataagggggacttaacattgctggaccggacaattttaggggtggtgggtccaaggaggccaagtgattatagcttggccggtataaaaaaactcttgcctggcttaattcaaaaagacctggtgataagctctggcctagctatgggggtggatgcctgggcccaccaagctgctatctattttggtgggtctaccatagctgtagtggcgacgggcttggacttggcttatccagctagtaaccgcaagctgcaagatctgatcagccaaaagcacctggtcatcagtgaatacccctatggctgccgggctcaaaagtggcactttccagaacgtaaccggattattgctggcataagccggggagtcttggtcacagaagctaggaagcagagtgggactttaattacggcccagcttgctttagaggagggccgggatgtttttgcactaccgggccggattgacagcccactttcagaaggatgtaaccttttaattagtcagggggctcggccagtcacccatcaagaggatatcctaaaagactggtcattataa

SEQ ID NO: 3938 - protein, 290 aa, Alloiococcus otitidis
MKNTWTLDHYLILLAECSFLTPTDKWALLGSVYPDLIAELDLPWLAKIRLNSEKARRFSHFIAISGRDIINSYDLDPVDRLTFFDPNYPDPLRHIYAPPLLLYYKGDLTLLDRTILGVVGPRRPSDYSLAGIKKLLPGLIQKDLVISSGLAMGVDAWAHQAAIYFGGSTIAVVATGLDLAYPASNRKLQDLISQKHLVISEYPYGCRAQKWHFPERNRIIAGISRGVLVTEARKQSGTLITAQLALEEGRDVFALPGRIDSPLSEGCNLLISQGARPVTHQEDILKDWSL

SEQ ID NO: 3939 - DNA, 627 bp, Alloiococcus otitidis
  CDS (46)..(624)
atattactgggcttcttctacataatcacaattggaacactggacttggaccttggaccgggtccgtttttccaccaaaaactcgtcgcatttaggacacgaccgaggcaagggcttgtcccaagagacaaagtcgcagtcagggtagttttcacagccatagaacttacggttcttcttggacttccgttccactacctctccgtccttacatttgggacaggtggtgccgacttttttcaaaataggcttggtgttgcggcagtctgggaaattagaacaggcataaaatttgccgtagcgacccattttaatcaccatttcgcccccgcacttatcacatttaaagccagctggttcgtcttcaatctcgacttcttccatttcttcttcagccttgctgacatcatctttaaactcttgatagaattggtcgatcaccttgacccattctttcttaccttcttccaccttgtccaagtcttcttcaagctcggctgtaaagttaacatccacgatatcggggaagaattctactacgatgtcattgacgatttcaccgagttcagttggttcaaaccgcttgttggtcaaagtaacataatagcgtttttggatggtccctaa

SEQ ID NO: 3940 - protein, 193 aa, Alloiococcus otitidis
MDLGPGPFFHQKLVAFRTRPRQGLVPRDKVAVRVVFTAIELTVLLGLPFHYLSVLTFGTGGADFFQNRLGVAAVWEIRTGIKFAVATHFNHHFAPALITFKASWFVFNLDFFHFFFSLADIIFKLLIELVDHLDPFFLTFFHLVQVFFKLGCKVNIHDIGEEFYYDVIDDFTEFSWFKPLVGQSNIIAFLDGP

SEQ ID NO: 3941 - DNA, 2115 bp, Alloiococcus otitidis
  CDS (7)..(2112)
cctattatgataagcgcaattaagttagccttgaaaggagcccgacatttggcctataaatacttggtgatcgtggaatcaccagcaaaagcgaagacaattgaaaaatatttgggtcgcaattataaggttgtggccagcaaaggacatattcgtgacctgcccaaaagtcgcatggcggtagactttgaagataactacaagccagaatacatcactatccggggtaagggaccggtgatccaagatttgaagaagcaagccaagaaagctgaaaaagtttacctagctgccgacccggaccgggagggggaagccattgcctggcacctatcttatgtcttgaagcttgaccaggatgataaaaaccgggtagtcttcaatgaaattactaaagatgcggtaaaagatgcctttaagtcgccccgaaccttggacaaggacctgattgattcccagcaagcacgccgggttttggaccggattgtcggttaccaaatcagccctttattatggaagaaagtcaaacgaggtctgagtgcgggccgggtccagtccgtcgccttaaagatgatttgcgaccgtgaagaagaaatccgccagttcaaaccggaagaatattggacacttgatggtaaatttaaaaagtcccggtctaagtttgatgctaaatttttccgcttggacaataagaaaaaagacctgcccaacaaggaggcagtcgatcaggtcatccagcgactggaccaagatcaggactttgatgtggtaaaagtggacaagagccagagacggaaaaatccccaggccccctttaccacttccagtttgcaacaagaagcagccaaccgactcaacttccggaccggcaagaccatgatggtcgcccagcaattgtatgaagggattaagataggacgtggcgctgccactggtttaattacctacatgcgtaccgactccaaacgtatttcagacttggctaaggctgaagcagccaacttcatccatgatgaatacggttcaaaatacgcttcccgcaagaaggctccagcaaagaatgccagcggagcccaagatgcccacgaggctatccgcccgaccagtgctatgcggaagccggaagacatcgaaaaatatttgtccaaggaccagtataagttgtataacttgatttggtcccgttttatagctagccaaatgaaaccagctgtctatgacaccatgaaggttgacctggtccaaaacggagtaaccttcagagccaatgggtctaaaattaaattccagggttaccaaaaggtttaccgggatacttccaagcaaaaagataacctcctgccagacctcaaggaaggggatgcggtcaagttagataagcttagtccagaccaacacttcacccaaccgccagcccgctatagcgaggcgaccttaatcaagacattggaggaaaacggagtgggtcgcccttcgacttatgctccaaccttagggaccatccaaaaacgctattatgttactttgaccaacaagcggtttgaaccaactgaactcggtgaaatcgtcaatgacatcgtagtagaattcttccccgatatcgtggatgttaactttacagccgagcttgaagaagacttggacaaggtggaagaaggtaagaaagaatgggtcaaggtgatcgaccaattctatcaagagtttaaagatgatgtcagcaaggctgaagaagaaatggaagaagtcgagattgaagacgaaccagctggctttaaatgtgataagtgcgggggcgaaatggtgattaaaatgggtcgctacggcaaattttatgcctgttctaatttcccagactgccgcaacaccaagcctattttgaaaaaagtcggcaccacctgtcccaaatgtaaggacggagaggtagtggaacggaagtccaagaagaaccgtaagttctatggctgtgaaaactaccctgactgcgactttgtctcttgggacaagcccttgcctcggtcgtgtcctaaatgcgacgagtttttggtggaaaaacggacccggtccaaggtccaagtccagtgttccaattgtgattatgtagaagaagcccagtaa

SEQ ID NO: 3942 - protein, 702 aa, Alloiococcus otitidis
MISAIKLALKGARHLAYKYLVIVESPAKAKTIEKYLGRNYKVVASKGHIRDLPKSRMAVDFEDNYKPEYITIRGKGPVIQDLKKQAKKAEKVYLAADPDREGEAIAWHLSYVLKLDQDDKNRVVFNEITKDAVKDAFKSPRTLDKDLIDSQQARRVLDRIVGYQISPLLWKKVKRGLSAGRVQSVALKMICDREEEIRQFKPEEYWTLDGKFKKSRSKFDAKFFRLDNKKKDLPNKEAVDQVIQRLDQDQDFDVVKVDKSQRRKNPQAPFTTSSLQQEAANRLNFRTGKTMMVAQQLYEGIKIGRGAATGLITYMRTDSKRISDLAKAEAANFIHDEYGSKYASRKKAPAKNASGAQDAHEAIRPTSAMRKPEDIEKYLSKDQYKLYNLIWSRFIASQMKPAVYDTMKVDLVQNGVTFRANGSKIKFQGYQKVYRDTSKQKDNLLPDLKEGDAVKLDKLSPDQHFTQPPARYSEATLIKTLEENGVGRPSTYAPTLGTIQKRYYVTLTNKRFEPTELGEIVNDIVVEFFPDIVDVNFTAELEEDLDKVEEGKKEWVKVIDQFYQEFKDDVSKAEEEMEEVEIEDEPAGFKCDKCGGEMVIKMGRYGKFYACSNFPDCRNTKPILKKVGTTCPKCKDGEVVERKSKKNRKFYGCENYPDCDFVSWDKPLPRSCPKCDEFLVEKRTRSKVQVQCSNCDYVEEAQ

SEQ ID NO: 3943 - DNA, 1308 bp, Alloiococcus otitidis
  CDS (13)..(1305)
actttaggtgaaatgacagaaatgtatcgtaagtctccaaacttaatggagcaagttgttgacagaagaaacttggaaacagcagccaaagccgttaaacggaacaaaggcgctgcaggtattgacggtatgaccgtttttgagatagaggagcacattcaagcgtattatcaacccttacggaagaaattacttgatggaacgtataagcctcaaccagttaaacgagtagaaataccaaagccgaatggagaaaaacgaaagttaggtataccttgtgtgcgggatagagttgttcaacaagccatacggcaagtaattgaaccgattatagacccgcacttctatgacaacagtcacggattccgaccagggaaaagcacgcacagtgctctcaagcaatgtgcacagtattataaagaaggctatcgtgttgtagttgattgtgacctcaaacaatgctttgacacgctcaatcacgacaaacttatctattatcttgaacagtacatccaagataaaatgatactgaaaattatccgtaagtttttgagagcgggtgtaattgatttgactagcgaatttatcgcaagtgaaacaggggcaccacaaggtggtgttctatcaccgcttttgagtaatgtgtacttacatgaactggataaagagttggttaaccgtggtcaccgatttgtccgatacgcagatgactttgtcatctacgttaaatcaaaacgagccggtgaacgggtaatgaacagcatcacacgctttattgaaaaagacttaaagttaatcgtcaatcaagacaaaagccaggttgggtctcctacccgtttaaagtttttgagctgtctgatgaagcaagtgaatggggattatcgttttatccctaccaaagaagccaagcagaaattcaaacgcagattgagaaagctgaccagtcgtaaacggccaggtacttttaaaaagataatgactgaaattaatcgagtcacccgcggttggattaattactttggtttaggcttcattaaaagctttatcaaagaagttgagcaatggttaaatcaccgtatcagacagctgattcttaaacggtggaaacgtccacgaactattataccaaagttggaacaatatggactggacttagattcagccaaacggattgcgtattcacgcaaaaagtactggcgactgtcatgcacacatgaatttcatcgtgcaataacaacagaaagactcagcaagtggggcttagttccactaagcactatcgctgagtctgcttacgcaagatattga

SEQ ID NO: 3944 - protein, 431 aa, Alloiococcus otitidis; identical to SEQ ID NO: 314

SEQ ID NO: 3945 - DNA, 1371 bp, Alloiococcus otitidis
  CDS (31)..(1368)
tttaaagatgagttttggaaggagatcaagatgaaaaagagccaaaagatcatcgaaaaggataaaaagtattttgcagaagccggccgggtaccctattacccctttgtggtggaccatgccaaggggtcgcggattacggatgtcgatggcaaggagtatattgacctcttgtcttcagcctcagccttaaacctaggccaccgaccccaaaaggtagtggacgctatcattgaccagacccaacgctttatccactacacacctggttacagccaccataagcctttaacggagttagcggagcggttagccaagttgacccctggagactttgctaaaaaagtttcctttggcttgtcagggtcagatgccagtgatggtctgatcaagtttgcccgggcctatacaggacggcaaaacattatcacttttgaaaattcctaccatgggtctacttacggagcgatttctttatcagccatatctttaaatatgagacggaagattggtcccttcttacccggcgtctaccatattccctttcctgacaattaccgggggatgtacgggcaaaaagaccccctaagtgcagaagactatctagctcccttaaagtccatgcttcatagctatctgccaggtgaagaagtggcagccgttgtggtcgaaaccctacaaggagatggaggcttattggagcctgtccccggttacttcgaaaagttatatgatatttgccaggaatatggcattttattctgtgtagatgatgtccagcaaggtttaggacggactgggaaatggtcctcgatcgaacactttaatgtggttccagacctggtgacttatggcaagtccttggcgggaggtttgcccttatcagccattgtcggccgggctgaaattatggatagtctagggtcaattggccatgtctttacaaccggtgccaacccagtttgttgccaggcagccctagctgtcctagacaccatggaggaagaagataccctacaagctagcctagataagggggaccaggccagggctagaatggcgacctggcttgaagactacgactttgttggcgatgtccggggcctcggcctgtcgattgggattgaaattgtcaaagatcaagaccaaaaagaaagagaccctcaagcagctttgaaaataaccaaccggtgttatgaaaagggtgttttgattataaccctagccggcaatgttttgcgcttccagccacccctaaacattagccaggaagacctggaccaggctttaacgattatcgaagagtctttggctgactaccaggctggattattggatggctatgatgtcagtggccagggttggtcataa

SEQ ID NO: 3946 - protein, 446 aa, Alloiococcus otitidis
MKKSQKIIEKDKKYFAEAGRVPYYPFVVDHAKGSRITDVDGKEYIDLLSSASALNLGHRPQKVVDAIIDQTQRFIHYTPGYSHHKPLTELAERLAKLTPGDFAKKVSFGLSGSDASDGLIKFARAYTGRQNIITFENSYHGSTYGAISLSAISLNMRRKIGPFLPGVYHIPFPDNYRGMYGQKDPLSAEDYLAPLKSMLHSYLPGEEVAAVVVETLQGDGGLLEPVPGYFEKLYDICQEYGILFCVDDVQQGLGRTGKWSSIEHFNVVPDLVTYGKSLAGGLPLSAIVGRAEIMDSLGSIGHVFTTGANPVCCQAALAVLDTMEEEDTLQASLDKGDQARARMATWLEDYDFVGDVRGLGLSIGIEIVKDQDQKERDPQAALKITNRCYEKGVLIITLAGNVLRFQPPLNISQEDLDQALTIIEESLADYQAGLLDGYDVSGQGWS

SEQ ID NO: 3947 - DNA, 1206 bp, Alloiococcus otitidis
  CDS (49)..(1203)
tgtcagtggccagggttggtcataaaaacaggaaaaggaggaaagaatatggaggaagtcaccagacaagaccaggttaaaggtcaagcatcgtcttcggccaaggtgagctatagccaggtagtcaagctggctggagccatgatcacagcgataatcgggtctggcttttcaagtggggaggaaattctgcagtttttctcggtttacggcatccggggcatgatttcagccttgctggtcctagtggtcttagccatcacctcaggccttatcatgcagtatggctttagccatcccagcaacccgcctaagactgtctttaaatactatgtgggcaaggtttttggaagtttcttaaatatctacatcccaattttggccttcttgattggggtagtgactgtttcaggggctggtgctgctattaaccagtactttggcctggccaacttttgggggactgctttgataacgatcattgttctcctagcagtcttacttggctttgaccgcttaatcaatgttttaggggcacttggccccattactttgattgcctcgattgggattggcctttacacactgctgaccaatttcagtgccctccaagtttcagaggcttacttgcaagtcgccaaccagtacacagatgtgccttacggggcagggaacggtatgggattctggtggttggccggtattctctttatcagttacaccatgatgggggccattccttttatttcccagctagggactagaggcgggaccaaaaaggaaagtttcctcggcggtgttcttggtggcgttggtttgatggtgaccgccatcttccttaacttggccatgttgacagatattgaacaggtcttaaatgttgaagtccccgttctttacttggcccaggccatcagcccagtggtgggcggaattttcatttatgtcctcttgcaggagatgtttaccacttcttgtgcctttctatggactgtgtctgatgccatcaccaagaagtcagcctcctctagggtcaagaaatggattattgtcttgatttctctagccaccctggccggagcccaacttccctttagaaccttggttaatattgtctacccgatttcgggttatatcgggattatcttcctggtggccctctttgccaaggaagcttaccggttagcacagtccaaaaaagcttaa

SEQ ID NO: 3948 - protein, 385 aa, Alloiococcus otitidis
MEEVTRQDQVKGQASSSAKVSYSQVVKLAGAMITAIIGSGFSSGEEILQFFSVYGIRGMISALLVLVVLAITSGLIMQYGFSHPSNPPKTVFKYYVGKVFGSFLNIYIPILAFLIGVVTVSGAGAAINQYFGLANFWGTALITIIVLLAVLLGFDRLINVLGALGPITLIASIGIGLYTLLTNFSALQVSEAYLQVANQYTDVPYGAGNGMGFWWLAGILFISYTMMGAIPFISQLGTRGGTKKESFLGGVLGGVGLMVTAIFLNLAMLTDIEQVLNVEVPVLYLAQAISPVVGGIFIYVLLQEMFTTSCAFLWTVSDAITKKSASSRVKKWIIVLISLATLAGAQLPFRTLVNIVYPISGYIGIIFLVALFAKEAYRLAQSKKA

SEQ ID NO: 3949 - DNA, 1206 bp, Alloiococcus otitidis; identical to SEQ ID NO: 3947
  CDS (16)..(1203)

SEQ ID NO: 3950 - protein, 396 aa, Alloiococcus otitidis
MVIKTGKGGKNMEEVTRQDQVKGQASSSAKVSYSQVVKLAGAMITAIIGSGFSSGEEILQFFSVYGIRGMISALLVLVVLAITSGLIMQYGFSHPSNPPKTVFKYYVGKVFGSFLNIYIPILAFLIGVVTVSGAGAAINQYFGLANFWGTALITIIVLLAVLLGFDRLINVLGALGPITLIASIGIGLYTLLTNFSALQVSEAYLQVANQYTDVPYGAGNGMGFWWLAGILFISYTMMGAIPFISQLGTRGGTKKESFLGGVLGGVGLMVTAIFLNLAMLTDIEQVLNVEVPVLYLAQAISPVVGGIFIYVLLQEMFTTSCAFLWTVSDAITKKSASSRVKKWIIVLISLATLAGAQLPFRTLVNIVYPISGYIGIIFLVALFAKEAYRLAQSKKA

SEQ ID NO: 3951 - DNA, 1308 bp, Alloiococcus otitidis
  CDS (13)..(1305)
actttaggtgaaatgacagaaatgtatcgtaagtctccaaacttaatggagcaagttgttgacagaagaaacttggaaacagcagccaaagccgttaaacggaacaaaggcgctgcaggtattgacggtatgaccgtttttgagatagaggagcacattcaagcgtattatcaacccttacggaagaaattacttgatggaacgtataagcctcaaccagttaaacgagtagaaataccaaagccgaatggagaaaaacgaaagttaggtataccttgtgtgcgggatagagttgttcaacaagccatacggcaagtaattgaaccgattatagacccgcacttctatgacaacagtcacggattccgaccagggaaaagcacgcacagtgctctcaagcaatgtgcacagtattataaagaaggttatcgtgttgtagttgattgtgacctcaaacaatgctttgacacgctcaatcacgacaaacttatctattatcttgaacagtacatccaagataaaatgatactgaaaattatccgtaagtttttgagagcgggtgtaattgatttgactagcgaatttatcgcaagtgaaacaggggcaccacaaggtggtgttctatcaccgcttttgagtaatgtgtacttacatgaactggataaagagttggttaaccgtggtcaccgatttgtccgatacgcagatgactttgtcatctacgttaaatcaaaacgagccggtgaacgggtaatgaacagcatcacacgctttattgaaaaagacttaaagttaatcgtcaatcaagacaaaagccaggttgggtctcctacccgtttaaagtttttgagctgtctgatgaagcaagtgaatggggattatcgttttatccctaccaaagaagccaagcagaaattcaaacgcagattgagaaagctgaccagtcgtaaacggccaggtacttttaaaaagataatgactgaaattaatcgagtcacccgcggttggattaattactttggtttaggcttcattaaaagctttatcaaagaagttgagcaatggttaaatcaccgtatcagacagctgattcttaaacggtggaaacgtccacgaactattataccaaagttggaacaatatggactggacttagattcagccaaacggattgcgtattcacgcaaaaagtactggcgactgtcatgcacacatgaatttcatcgtgcaataacaacagaaagactcagcaagtggggcttagttccactaagcactatcgctgagtctgcttacgcaagatattga

SEQ ID NO: 3952 - protein, 431 aa, Alloiococcus otitidis; identical to SEQ ID NO: 314

SEQ ID NO: 3953 - DNA, 909 bp, Alloiococcus otitidis
  CDS (13)..(906)
agggtgagtgtcatgagccaagactatgtgactttatttgcagattatttaatatatgaaagacagtactccagcttaaccaaggaggcctacctggaagacattaaggacttccaccacttcttaaaccaatcaggatccagtgatttactccaagtccaacctagcgatgccagactttacctggcctatttgacggaaaaccactacagcaaggctagtatttcccggaagttatccagtaaccgggccttttaccaatttttgctccaaaatgacctagttgagaccaacccctttgcttacttaaatgtcagaaaacaagggatccgcttgccccagttcttttacgaggaagaaatggaggccctctttgaggcggttgaaggccaagatgatttgacaatacgcaaccgggccctcttggaacttttgtatgcaacgggtatccggctaagcgaatgccagcaaattcggctcaaggatattgactttgacttgtccatcctgtttgttaaggggaaagggaacaaagagcggtatgttccatttggctattatgcaaacctggccctcaaggattatatcgaccaagcccgaccaagcttgatggccaaaagtcaagcggaccatgactatctgtttgtcaatcgcttggggaaccatatcacgaatgaagggattgcctatatcctcaaccaggtggtcaaaaagtccagcctagccagtgatatccacccccacatgcttcgccatacctttgctacccacctattaaaccaaggggcagatatgcggacggtccaagagctcttgggccaccagagtctgtcttccacccagatttacgctcatgtcaccaaggaccatttgcaaagagcctacaagcaatttcacccacgatcataa

SEQ ID NO: 3954 - protein, 298 aa, Alloiococcus otitidis
MSQDYVTLFADYLIYERQYSSLTKEAYLEDIKDFHHFLNQSGSSDLLQVQPSDARLYLAYLTENHYSKASISRKLSSNRAFYQFLLQNDLVETNPFAYLNVRKQGIRLPQFFYEEEMEALFEAVEGQDDLTIRNRALLELLYATGIRLSECQQIRLKDIDFDLSILFVKGKGNKERYVPFGYYANLALKDYIDQARPSLMAKSQADHDYLFVNRLGNHITNEGIAYILNQVVKKSSLASDIHPHMLRHTFATHLLNQGADMRTVQELLGHQSLSSTQIYAHVTKDHLQRAYKQFHPRS

SEQ ID NO: 3955 - DNA, 909 bp, Alloiococcus otitidis; identical to SEQ ID NO: 3953
  CDS (4)..(906)

SEQ ID NO: 3956 - protein, 301 aa, Alloiococcus otitidis
MSVMSQDYVTLFADYLIYERQYSSLTKEAYLEDIKDFHHFLNQSGSSDLLQVQPSDARLYLAYLTENHYSKASISRKLSSNRAFYQFLLQNDLVETNPFAYLNVRKQGIRLPQFFYEEEMEALFEAVEGQDDLTIRNRALLELLYATGIRLSECQQIRLKDIDFDLSILFVKGKGNKERYVPFGYYANLALKDYIDQARPSLMAKSQADHDYLFVNRLGNHITNEGIAYILNQVVKKSSLASDIHPHMLRHTFATHLLNQGADMRTVQELLGHQSLSSTQIYAHVTKDHLQRAYKQFHPRS

SEQ ID NO: 3957 - DNA, 555 bp, Alloiococcus otitidis
  CDS (13)..(552)
cggaggaatcatatgacaaccatacttgcaatccaacacgacggccagtctgctatgtctggcgacggccaagttaccttaggcgaacaggtcatgatgaagggcaaggcccaaaaagtcagacgggtctacaatgaccaagtcttagtcggctttgctgggggagtagcggatgcttttaccctggaagaaaaattcgtcggctacctcaacaaacactcaggcaatctgcagcggtcagctgttgaactagcccgggagtggcggtcagacaaggccatgaaaaacttagaagccctcttaattgtcatggacaaggatgacttgcttctggtctccggtaacggcgaagtgatctcgcctgatgacgggattttagccatcgggtcagggggcaactttgccttgtctgctgcccgcatgctcaaaaaacacgctggtgacaagttgtcagctgctgacatttcgactgaggctttacacgccgctgctgatatctgtgtttacaccaaccacaatgtgattactgaaagtattgaaggaggaaaagagtga

SEQ ID NO: 3958 - protein, 180 aa, Alloiococcus otitidis
MTTILAIQHDGQSAMSGDGQVTLGEQVMMKGKAQKVRRVYNDQVLVGFAGGVADAFTLEEKFVGYLNKHSGNLQRSAVELAREWRSDKAMKNLEALLIVMDKDDLLLVSGNGEVISPDDGILAIGSGGNFALSAARMLKKHAGDKLSAADISTEALHAAADICVYTNHNVITESIEGGKE

SEQ ID NO: 3959 - DNA, 534 bp, Alloiococcus otitidis
  CDS (22)..(531)
atatcttcggagttaatcaacttgtctgcctcttcttcagtaaaaatatccacagcctgttctacggtaactgtccgcttgacctttttgttgggggtgagtgaccctagggtatccgaaaaatcaagccctaattgctcgaattgctgggtcattggggaattaggggtttgttttttctcttcgaccttgatgtctacttccttctggtcgataacccctcgtttgatttggtcaacaatgtctcgtcttttagaagcaacttcttctgagacttcttcttcctcttcagcttcttggttaaaccggttcaaggcttctgtgtccacccccatgctgttcatcatggaagcaaagggattgttggcttggttgtggtttttgcgcttgccaggagccagagccttggctacccgcttgatggctgcttgccgggcttcaggccggacttcttgccgtttttcttcccgcactaggcggacagcacgctcgattaggtcccggaccatggattcaacgtctcgcccgacatag

SEQ ID NO: 3960 - protein, 170 aa, Alloiococcus otitidis
MSASSSVKISTACSTVTVRLTFLLGVSDPRVSEKSSPNCSNCWVIGELGVCFFSSTLMSTSFWSITPRLIWSTMSRLLEATSSETSSSSSASWLNRFKASVSTPMLFIMEAKGLLAWLWFLRLPGARALATRLMAACRASGRTSCRFSSRTRRTARSIRSRTMDSTSRPT

SEQ ID NO: 3961 - DNA, 252 bp, Alloiococcus otitidis
  CDS (28)..(249)
cccctctacgatagggaggatatctctttggactccttctcgggaaacttggccactgccttgggaatcattggtcgaggtgatcttgtcaatctcatcgataaagatcaagccattattctctgccaattgaacggcttcagcatgaatatcttcggagttaatcaacttgtctgcctcttcttcagtaaaaatatccacagcctgttctacggtaactgtccgcttgacctttttgttgggggtgagtga

SEQ ID NO: 3962 - protein, 74 aa, Alloiococcus otitidis
MDSFSGNLATALGIIGRGDLVNLIDKDQAIILCQLNGFSMNIFGVNQLVCLFFSKNIHSLFYGNCPLDLFVGGE

SEQ ID NO: 3963 - DNA, 399 bp, Alloiococcus otitidis
  CDS (139)..(396)
agaatgtactggctcaagtcttggtcaccagcgatgtggccaattttatcttccacatattgctcagtgatcttcacctggccaatattcatatcagaggcttcaaataagaggtcttctagaagtttttctaagatagtgtgcaggcggcgggctccgatattatcagtattttcgttgaccctaaaggcaatatcggcaattttttcgatggcatccatggtaaagataacctcaatattctcagtccccaagagggccttgtactgttccaccaaggcattattgggttccgttaagatggaaacaaagtcttgggcggtaagatcattgagttctacccggatagggaaccggccttggagttctggaatcaagtcactaggcttggacaagtga

SEQ ID NO: 3964 - protein, 86 aa, Alloiococcus otitidis
MCRRRAPILSVFSLTLKAISAIFSMASMVKITSIFSVPKRALYCSTKALLGSVKMETKSWAVRSLSSTRIGNRPWSSGIKSLGLDK

SEQ ID NO: 3965 - DNA, 399 bp, Alloiococcus otitidis; identical to SEQ ID NO: 3963
  CDS (4)..(396)

SEQ ID NO: 3966 - protein, 131 aa, Alloiococcus otitidis
MYWLKSWSPAMWPILSSTYCSVIFTWPIFISEASNKRSSRSFSKIVCRRRAPILSVFSLTLKAISAIFSMASMVKITSIFSVPKRALYCSTKALLGSVKMETKSWAVRSLSSTRIGNRPWSSGIKSLGLDK

SEQ ID NO: 3967 - DNA, 1443 bp, Alloiococcus otitidis
  CDS (151)..(1440)
aggaggaaaagagtgaaagccaagctagacttatcacccagagagattgttgaccgcctgaaccaatacatcattggccaggatgaggccaaaaaatcggtggccatcgccctaagaaaccgctaccgaagattgcaattagatagcgacatgcaaaaagaaataacccctaaaaacatcctgatgattgggcccactggggtagggaagaccgaaattgctagaaggttagccgatattgtcaacgctccctttgtaaaaatagaagcaactaagtttaccgaagtgggctatgtcgggcgagacgttgaatccatggtccgggacctaatcgagcgtgctgtccgcctagtgcgggaagaaaaacggcaagaagtccggcctgaagcccggcaagcagccatcaagcgggtagccaaggctctggctcctggcaagcgcaaaaaccacaaccaagccaacaatccctttgcttccatgatgaacagcatgggggtggacacagaagccttgaaccggtttaaccaagaagctgaagaggaagaagaagtctcagaagaagttgcttctaaaagacgagacattgttgaccaaatcaaacgaggggttatcgaccagaaggaagtagacatcaaggtcgaagagaaaaaacaaacccctaattccccaatgacccagcaattcgagcaattagggcttgatttttcggataccctagggtcactcacccccaacaaaaaggtcaagcggacagttaccgtagaacaggctgtggatatttttactgaagaagaggcagacaagttgattaactccgaagatattcatgctgaagccgttcaattggcagagaataatggcttgatctttatcgatgagattgacaagatcacctcgaccaatgattcccaaggcagtggccaagtttcccgagaaggagtccaaagagatatcctccctatcgtagaggggtcagcggttcggaccaagtacgggacggttcacaccgaccacatcctctttattgggtctggggcctttcacttgtccaagcctagtgacttgattccagaactccaaggccggttccctatccgggtagaactcaatgatcttaccgcccaagactttgtttccatcttaacggaacccaataatgccttggtggaacagtacaaggccctcttggggactgagaatattgaggttatctttaccatggatgccatcgaaaaaattgccgatattgcctttagggtcaacgaaaatactgataatatcggagcccgccgcctgcacactatcttagaaaaacttctagaagacctcttatttgaagcctctgatatgaatattggccaggtgaagatcactgagcaatatgtggaagataaaattggccacatcgctggtgaccaagacttgagccagtacattctttaa

SEQ ID NO: 3968 - protein, 430 aa, Alloiococcus otitidis
MQKEITPKNILMIGPTGVGKTEIARRLADIVNAPFVKIEATKFTEVGYVGRDVESMVRDLIERAVRLVREEKRQEVRPEARQAAIKRVAKALAPGKRKNHNQANNPFASMMNSMGVDTEALNRFNQEAEEEEEVSEEVASKRRDIVDQIKRGVIDQKEVDIKVEEKKQTPNSPMTQQFEQLGLDFSDTLGSLTPNKKVKRTVTVEQAVDIFTEEEADKLINSEDIHAEAVQLAENNGLIFIDEIDKITSTNDSQGSGQVSREGVQRDILPIVEGSAVRTKYGTVHTDHILFIGSGAFHLSKPSDLIPELQGRFPIRVELNDLTAQDFVSILTEPNNALVEQYKALLGTENIEVIFTMDAIEKIADIAFRVNENTDNIGARRLHTILEKLLEDLLFEASDMNIGQVKITEQYVEDKIGHIAGDQDLSQYIL

SEQ ID NO: 3969 - DNA, 1443 bp, Alloiococcus otitidis; identical to SEQ ID NO: 3967
  CDS (133)..(1440)

SEQ ID NO: 3970 - protein, 436 aa, Alloiococcus otitidis
MQLDSDMQKEITPKNILMIGPTGVGKTEIARRLADIVNAPFVKIEATKFTEVGYVGRDVESMVRDLIERAVRLVREEKRQEVRPEARQAAIKRVAKALAPGKRKNHNQANNPFASMMNSMGVDTEALNRFNQEAEEEEEVSEEVASKRRDIVDQIKRGVIDQKEVDIKVEEKKQTPNSPMTQQFEQLGLDFSDTLGSLTPNKKVKRTVTVEQAVDIFTEEEADKLINSEDIHAEAVQLAENNGLIFIDEIDKITSTNDSQGSGQVSREGVQRDILPIVEGSAVRTKYGTVHTDHILFIGSGAFHLSKPSDLIPELQGRFPIRVELNDLTAQDFVSILTEPNNALVEQYKALLGTENIEVIFTMDAIEKIADIAFRVNENTDNIGARRLHTILEKLLEDLLFEASDMNIGQVKITEQYVEDKIGHIAGDQDLSQYIL

SEQ ID NO: 3971 - DNA, 1443 bp, Alloiococcus otitidis; identical to SEQ ID NO: 3967
  CDS (13)..(1440)

SEQ ID NO: 3972 - protein, 476 aa, Alloiococcus otitidis
MKAKLDLSPREIVDRLNQYIIGQDEAKKSVAIALRNRYRRLQLDSDMQKEITPKNILMIGPTGVGKTEIARRLADIVNAPFVKIEATKFTEVGYVGRDVESMVRDLIERAVRLVREEKRQEVRPEARQAAIKRVAKALAPGKRKNHNQANNPFASMMNSMGVDTEALNRFNQEAEEEEEVSEEVASKRRDIVDQIKRGVIDQKEVDIKVEEKKQTPNSPMTQQFEQLGLDFSDTLGSLTPNKKVKRTVTVEQAVDIFTEEEADKLINSEDIHAEAVQLAENNGLIFIDEIDKITSTNDSQGSGQVSREGVQRDILPIVEGSAVRTKYGTVHTDHILFIGSGAFHLSKPSDLIPELQGRFPIRVELNDLTAQDFVSILTEPNNALVEQYKALLGTENIEVIFTMDAIEKIADIAFRVNENTDNIGARRLHTILEKLLEDLLFEASDMNIGQVKITEQYVEDKIGHIAGDQDLSQYIL

SEQ ID NO: 3973 - DNA, 642 bp, Alloiococcus otitidis
  CDS (364)..(639)
gtccaatcaataatgaggagactatatatgttgatttcattactgggtttattcttggcctacctgtctgggtccatcccaagcggttactggctgggaaaactattttaccatactgatattagccaacacggcagcggaaacactgggactaccaatgtctttcgagtcttgggcgttgcaccaggcctcattacctttttcctggatgcctttaaaggttatctgccggcttacttagctttttccgtcttccaacctgccttccaccccattttttatggcctggcagctattttaggccatgccttttccatcttcaacaggtttaaggggggcaaggcagttgccacttcctgcggggtggcttttgccatgtaccccatttacctcctgtccatgttagggattttctttgccaccctcttcatctctagcatggtcagcctggcttccatggtggccattgggtcagcctttgtcttcagcttcctcctggacgacctggtctttaccatcgctgtaggcttcttgttcctcttcgtcctttaccgccacaaggacaatattgtccgaatcaaaaatggaacagaaagccatgttccttttggcttaaattccagtaaaaaacaaggcaaataa

SEQ ID NO: 3974 - protein, 92 aa, Alloiococcus otitidis
MAFAMYPIYLLSMLGIFFATLFISSMVSLASMVAIGSAFVFSFLLDDLVFTIAVGFLFLFVLYRHKDNIVRIKNGTESHVPFGLNSSKKQGK

SEQ ID NO: 3975 - DNA, 642 bp, Alloiococcus otitidis; identical to SEQ ID NO: 3973
  CDS (13)..(639)

SEQ ID NO: 3976 - protein, 209 aa, Alloiococcus otitidis
MRRLYMLISLLGLFLAYLSGSIPSGYWLGKLFYHTDISQHGSGNTGTTNVFRVLGVAPGLITFFLDAFKGYLPAYLAFSVFQPAFHPIFYGLAAILGHAFSIFNRFKGGKAVATSCGVAFAMYPIYLLSMLGIFFATLFISSMVSLASMVAIGSAFVFSFLLDDLVFTIAVGFLFLFVLYRHKDNIVRIKNGTESHVPFGLNSSKKQGK

SEQ ID NO: 3977 - DNA, 129 bp, Alloiococcus otitidis
  CDS (1)..(126)
atggctttctgttccatttttgattcggacaatattgtccttgtggcggtaaaggacgaagaggaacaagaagcctacagcgatggtaaagaccaggtcgtccaggaggaagctgaagacaaaggctga

SEQ ID NO: 3978 - protein, 42 aa, Alloiococcus otitidis
MAFCSIFDSDNIVLVAVKDEEEQEAYSDGKDQVVQEEAEDKG

SEQ ID NO: 3979 - DNA, 345 bp, Alloiococcus otitidis
  CDS (43)..(342)
acgccgttaagaaaagaccaggcatgtatatcgggtcaaccgatgccaggggtttgcaccacctggtttatgaaattaccgataatgctattgatgaggttttggctggctacgctgatgaaattgaagtcaagatccacacggacggctcggtttcggtcaaagacaatggacggggcatgccaaccgggatgcatgagtcaggcctacccaccatccaggttatctttaccgtcctccatgccgggggaaaatttggccaagagggggcctacaagtcagccggtggactccatggggttggggcctcggtcgtcaacgccttgtctgattggctcacggtga

SEQ ID NO: 3980 - protein, 100 aa, Alloiococcus otitidis
MPGVCTTWFMKLPIMLLMRFWLATLMKLKSRSTRTARFRSKTMDGACQPGCMSQAYPPSRLSLPSSMPGENLAKRGPTSQPVDSMGLGPRSSTPCLIGSR

SEQ ID NO: 3981 - DNA, 1968 bp, Alloiococcus otitidis
  CDS (82)..(1965)
agagatttgacgaaggaatcttacaatgattcatctataaccatactcaagggcttagacgccgttaagaaaagaccaggcatgtatatcgggtcaaccgatgccaggggtttgcaccacctggtttatgaaattaccgataatgctattgatgaggttttggctggctacgctgatgaaattgaagtcaagatccacacggacggctcggtttcggtcaaagacaatggacggggcatgccaaccgggatgcatgagtcaggcctacccaccatccaggttatctttaccgtcctccatgccgggggaaaatttggccaagagggggcctacaagtcagccggtggactccatggggttggggcctcggtcgtcaacgccttgtctgattggctcacggtgatagtgaccaaggacggctatgaataccggcaagactttagccaaggaggccaggctaaaggaggcatccagaagagaaaaattaaccagcaaaaatccagcaccctggtccacttcaaaccctcaggccaagtcttttcgaccaccgaatttaactttaacaccatctgtgagcggatgcgggagtcggccttccttgtcaaagggaccaagattaccgtagaggacctgcgccaggaagaaagccaggtcttccaatttaatgaaggaattaaggcctttgtcgactacttaaatgagggcaaggataccttgagtccagtaacctattttgaaggttctgaagatgaaattgaagttgaatttgccttccaatacaatgacggctattcggagacggttctgagttttgtcaacaatgtccgtacccgggatgggggcagccacgaaactggagctaagtcagctattaccaaggctttcaacgactatgctaggaaaagtggcttactcaaagagaaagacagtaacttggaaggatctgacgtccgggaagggattgcggttgttttatccgtccgtatcccagaagagattctccaatttgaaggccagaccaagagcaagttaggaactcctcaagcccggaccgccactgaccaggttatctcagaatccttaacttacttcctggccgaaaatggggacttgtctaagcaacttattcgcaaggccatccgagcccggtctgccagggaagcagctcgcaaggccaaggaccagtcccggaactctgcttccaagaaaaaagttgaaactctcctgtctggtaagttgaccccagctcaaagcaagaacgcccagaaaaatgaactttacttagtggagggggattcggctggtgggtcagccaagcaaggtagggaccggaaattccaagcaattttgcccctgcgtggaaaggttatcaacacagaaaaatcttctttggatgatattttaaaaaatgaagaaatttctaccatgatttataccatcggtgcaggtgctgggcctgagtttgatattgaagctgttaattacgataagatagtcattatgactgatgccgacacagacggcgcccacatccaggtccttctcctcaccttcttttaccggtacatgaaacccctgattgaagcagggaaggtctatattgccctaccgcccttgtataagttgaccaaaaagcaaggaaagcaagaaaaaacagcctatgcttggactgatgaggagttggaagacctggttaaagattttggcaaacactacactctccagcgctacaagggtttaggcgagatgaatgctgaccagttgtgggagaccaccatggacccagagaccagaaccttgatccgggtcaccattgaagacagtgaaaaggctgaaagacgggtttccaccttgatggggaccaaggtggatcctagacggaagtggattgaagaccatattgaattcagtctggcagaagatggcagtattttagagaacaaggtcctagaaggagaggccaagtaa

SEQ ID NO: 3982 - protein, 628 aa, Alloiococcus otitidis
MYIGSTDARGLHHLVYEITDNAIDEVLAGYADEIEVKIHTDGSVSVKDNGRGMPTGMHESGLPTIQVIFTVLHAGGKFGQEGAYKSAGGLHGVGASVVNALSDWLTVIVTKDGYEYRQDFSQGGQAKGGIQKRKINQQKSSTLVHFKPSGQVFSTTEFNFNTICERMRESAFLVKGTKITVEDLRQEESQVFQFNEGIKAFVDYLNEGKDTLSPVTYFEGSEDEIEVEFAFQYNDGYSETVLSFVNNVRTRDGGSHETGAKSAITKAFNDYARKSGLLKEKDSNLEGSDVREGIAVVLSVRIPEEILQFEGQTKSKLGTPQARTATDQVISESLTYFLAENGDLSKQLIRKAIRARSAREAARKAKDQSRNSASKKKVETLLSGKLTPAQSKNAQKNELYLVEGDSAGGSAKQGRDRKFQAILPLRGKVINTEKSSLDDILKNEEISTMIYTIGAGAGPEFDIEAVNYDKIVIMTDADTDGAHIQVLLLTFFYRYMKPLIEAGKVYIALPPLYKLTKKQGKQEKTAYAWTDEELEDLVKDFGKHYTLQRYKGLGEMNADQLWETTMDPETRTLIRVTIEDSEKAERRVSTLMGTKVDPRRKWIEDHIEFSLAEDGSILENKVLEGEAK

SEQ ID NO: 3983 - DNA, 1968 bp, Alloiococcus otitidis; identical to SEQ ID NO: 3981
  CDS (7)..(1965)

SEQ ID NO: 3984 - protein, 653 aa, Alloiococcus otitidis
MTKESYNDSSITILKGLDAVKKRPGMYIGSTDARGLHHLVYEITDNAIDEVLAGYADEIEVKIHTDGSVSVKDNGRGMPTGMHESGLPTIQVIFTVLHAGGKFGQEGAYKSAGGLHGVGASVVNALSDWLTVIVTKDGYEYRQDFSQGGQAKGGIQKRKINQQKSSTLVHFKPSGQVFSTTEFNFNTICERMRESAFLVKGTKITVEDLRQEESQVFQFNEGIKAFVDYLNEGKDTLSPVTYFEGSEDEIEVEFAFQYNDGYSETVLSFVNNVRTRDGGSHETGAKSAITKAFNDYARKSGLLKEKDSNLEGSDVREGIAVVLSVRIPEEILQFEGQTKSKLGTPQARTATDQVISESLTYFLAENGDLSKQLIRKAIRARSAREAARKAKDQSRNSASKKKVETLLSGKLTPAQSKNAQKNELYLVEGDSAGGSAKQGRDRKFQAILPLRGKVINTEKSSLDDILKNEEISTMIYTIGAGAGPEFDIEAVNYDKIVIMTDADTDGAHIQVLLLTFFYRYMKPLIEAGKVYIALPPLYKLTKKQGKQEKTAYAWTDEELEDLVKDFGKHYTLQRYKGLGEMNADQLWETTMDPETRTLIRVTIEDSEKAERRVSTLMGTKVDPRRKWIEDHIEFSLAEDGSILENKVLEGEAK

SEQ ID NO: 3985 - DNA, 2463 bp, Alloiococcus otitidis
  CDS (4)..(2460)
attatggcaggagaccaagagaccagtaaaatacaagaattaaccttagaagatgtcatgggggaccggttcggccggtattccaagtacattatacaggaaagggccctaccggacttgcgggacggtttaaaaccggtccaaagacggatcctctatgccatgcaccaggacaaaaacacctatgacaaggcttaccggaagtcggccaagacggtgggaaatgtcatagggaactaccacccccatggcgacacatccgtttacgatgccatggttaggctcagtcagccttggaagatgcgccatcctttggttgatatgcacgggaacaaggggagcatggacggggacccaccagctgccatgcggtacaccgaagcccgtctgtctaaaattgcttccgacctcctggctgatattgataaggagacggtggaccatgtcttaaactttgatgacacgaccgaggagcccaccgtcttacccgcccgttttcccaacctcttggtcaatggggctagcgggatttcagccggttatgctactgacataccgccccataatttgagcgaggtgattgatgccaccatccacttaatcaaccaccccaatgcaaggctggagactttgatggactatattcaaggaccagactttccgactggggggattatccaaggtaaaagtggcctgaagaaagcctaccaaacgggcaagggaaaaattatcatccgggccaaagcagatattgaggccatccggggtggcaaatcccaaattgtcatcagtcaaattccttatgaggtcaacaaggcaaggttggtccaaaaaattgacgacatccggattaacaaaaaaatcgacggcattgccgatgtccgggatgaaagtgaccggtctggcttgcggattgtggtcgaaaccaaaaaagatggtgatggggaagggatcttaacctacctgctgaaaaacaccgacctccaggtaacttataacttaaatatggtagccattgataaaaaacgaccccagcaagtctccctcaagcaaatcttatcttcttacttggaccacaagcggacagtggttcaaaaccggacccgttacctcttagccaaggccaaggaccgccagcacattgtccaaggccttatcaaggccatttcaatcctggatgacttgatccaaaccatccgggccagtgaaaacaaggccaatgccaaggaaaatattatccaggcttatggttttagccaagaccaagccgaagccattgtctccctccagctttaccgcttgaccaatacagatataaaggacttacaagcagaagccaaagacttagcccaagccatcctgacctaccaggacctcttaaccaacaaggccagcctggatgctttgatgaaagaagaattgaaagaagtcaaacaagcatatggggaggaccggctaacccaggtccaagacaagatcgaaaaactagaaatagaaacccaagtcctggtcagtgaagaagacgtcatggttaccgtcacccagggaggttacttgaagcggacctccatccggtcttacaaggcttcccaagtggaggaattgggccggcgagaagacgacttggtcatctttatgcaagagttgtcaaccctagaccaactccttattttcacctcgaaaggcaatgtggtcaaccgaccagtccatgaattaccggacatcaagtggaaggatattggagagcacttgtcaaggaccatcccccttggagaggacgaggaattgattaaggtgtacccttatcgggaattagatgccggcaagcgctatgtctttatcactcgagatggctatatcaaacaaagtccagagacggaatttgagcccaaacgaacttacaagtctcgggcttcaactgccattaaattaaaatcagaccaagatagactccaggcagtctactatattcctgaccaagaagattacgatgtattcctagccagctacaagggctacgggctcaagtatggactagaagaagtgtcagaagtaggggcccaggctgcaggcgtcaagtccatgaacctgaaagagggggaccatgtccaagatggtttggtctttaagcgtaagcagttccaagaagccttgttcattacccagcgagccagtgttaagaaaatggccctccatgactttgaccggacttcacgggccaagcggggtttacaaatcctcagagaactgaagcgaaacccccaccgaatccagtttatgatcggaatttcacaaaataaattcctggtcaatctcctaactgatacaaaaaaactagtacagataaacccagatgactatacagtttcaaaccgccataacaatgggtcttttgtcctggacacaagccgagatggcaagcctgtttcttactatttaagtgataacgattctcacttgtaa

SEQ ID NO: 3986 - protein, 819 aa, Alloiococcus otitidis
MAGDQETSKIQELTLEDVMGDRFGRYSKYIIQERALPDLRDGLKPVQRRILYAMHQDKNTYDKAYRKSAKTVGNVIGNYHPHGDTSVYDAMVRLSQPWKMRHPLVDMHGNKGSMDGDPPAAMRYTEARLSKIASDLLADIDKETVDHVLNFDDTTEEPTVLPARFPNLLVNGASGISAGYATDIPPHNLSEVIDATIHLINHPNARLETLMDYIQGPDFPTGGIIQGKSGLKKAYQTGKGKIIIRAKADIEAIRGGKSQIVISQIPYEVNKARLVQKIDDIRINKKIDGIADVRDESDRSGLRIVVETKKDGDGEGILTYLLKNTDLQVTYNLNMVAIDKKRPQQVSLKQILSSYLDHKRTVVQNRTRYLLAKAKDRQHIVQGLIKAISILDDLIQTIRASENKANAKENIIQAYGFSQDQAEAIVSLQLYRLTNTDIKDLQAEAKDLAQAILTYQDLLTNKASLDALMKEELKEVKQAYGEDRLTQVQDKIEKLEIETQVLVSEEDVMVTVTQGGYLKRTSIRSYKASQVEELGRREDDLVIFMQELSTLDQLLIFTSKGNVVNRPVHELPDIKWKDIGEHLSRTIPLGEDEELIKVYPYRELDAGKRYVFITRDGYIKQSPETEFEPKRTYKSRASTAIKLKSDQDRLQAVYYIPDQEDYDVFLASYKGYGLKYGLEEVSEVGAQAAGVKSMNLKEGDHVQDGLVFKRKQFQEALFITQRASVKKMALHDFDRTSRAKRGLQILRELKRNPHRIQFMIGISQNKFLVNLLTDTKKLVQINPDDYTVSNRHNNGSFVLDTSRDGKPVSYYLSDNDSHL

SEQ ID NO: 3987 - DNA, 2256 bp, Alloiococcus otitidis
  CDS (4)..(2253)
accatgcaaatgccaaacattgatactgaaaaatattggagcggatttacccaaggcaattggagtcagacagtcgatgtgagagactttatccaaaagaactacaaaccttatgatggcgatgagtctttcttagaaggtccaactcctgcaactgaccaactctggaaacaagtcatggacttgaatgagaaagaataccaagctggtggtgtcttggacttagacactaaaacaccttcaaccattacttctcacggtccaggctacctcaatgaagacttagaagaagttgtcggcttccaaactgacaaacctttcaaacggtccttccaaccctttggcgggatccggatggcagaacaagctgctgaatcatacggctacgaaattgatcctgaaatgtccaaaatattccgtgactatcgtaaaacccacaatgatggggtatacagtgcttatactaaagaaatgaaagcagcccgccacagtggggttattactggtttgccggatgcttatggtcggggccggattattggtgactaccgtcgtgttgccttgtacggggttgattacctcattgaagacaagaaagaagtctttgaaaattacggcgacggcaaaatgactgaagaagtcatccgccaacgggaagagctattcgaccaaatcaatgcgcttaaagagttaaaagaactgggccacatttacggctttgacatttccaaacctgcccgcaacgctaaggaagccttccaatggttgtacttggcatacttggcagctattaaacaacaaaacggggcagctatgtcctttggtcgtacttcaaccttcctagacatctatgtggaacgggaccttgaaaatggtactttaactgaaaaagaagcccaagagttagtggaccacctggttatgaaattacgtctggttaaatttgcccgtaccccagaatacaatgaattgttctcaggcgacccaacttgggtaactgaatccattgcgggtatcggcaaagacggccgccatatggtcactaaaaactcctaccgcttcctccacaccttaagtaaccttggcccagcccctgaaccaaacttaactgtcctttggtcagaaaaattacctcaaaacttcaaagaattctgtgccaaggtttccatcgcaagtagtgcagtccaatacgaaaacgatgaaatcatgcgaccatactttggtgacgactatggtattgcttgctgcgtttctgctatggaaattgggaagcaaatgcaattcttcggtgctcgtgccaacctagccaaggctctcttgtacgctattaacggcggggtagacgaagtaaccaaagaccaagttggccctaaatatgaacccatcacttcagaatacttggactatgatgaagtggtcgaaaaatatgaccaaatgactgaatggttggctgggctttacatcaacaccttgaatgttatccactacatgcacgacaagtattcctacgaaagcttggaaatggctcttcacgacactgaagtcttgcgaaccatggcaacaggtattgctggtttctctgtcgcagctgattccctctcagctattaagtatgctgacgttaaagtgatccgggatgaagatggtttagcagtcgactttgaaattgaaggcgactaccctaaatatgggaacaatgacgaacgagttgactctatcgcagttaacttgctggaaaaattcatggaaaaagttacccactatgacacttaccgaaactccaaacacaccacttccatcctcactattacttctaacgtggtttacggtaagaaaactggtaacactccagatggtcgtcgttacggtgacccatttgcaccaggtgctaacccactccacggcagagacagcaatggggctttagcatccttgaactctgtggctaaattgccttacaaatacagtttagatggtatttccaacaccttctctattgttccaggtgctcttggaaaagatgaagtcactcaaaaacaaaacctagctaccatgcttgacggctacagcaacaagggcggccaccacttaaacgttaacgtgatgaaccggtctaccttagaggatgccatggaacacccagaagaatacccacaattaaccatccgggtatctggttatgctgttaacttcattaaattaacccgagaacaacaattagacgttattaaccgaaccttccacgaatccatgtaa

SEQ ID NO: 3988 - protein, 750 aa, Alloiococcus otitidis
MQMPNIDTEKYWSGFTQGNWSQTVDVRDFIQKNYKPYDGDESFLEGPTPATDQLWKQVMDLNEKEYQAGGVLDLDTKTPSTITSHGPGYLNEDLEEVVGFQTDKPFKRSFQPFGGIRMAEQAAESYGYEIDPEMSKIFRDYRKTHNDGVYSAYTKEMKAARHSGVITGLPDAYGRGRIIGDYRRVALYGVDYLIEDKKEVFENYGDGKMTEEVIRQREELFDQINALKELKELGHIYGFDISKPARNAKEAFQWLYLAYLAAIKQQNGAAMSFGRTSTFLDIYVERDLENGTLTEKEAQELVDHLVMKLRLVKFARTPEYNELFSGDPTWVTESIAGIGKDGRHMVTKNSYRFLHTLSNLGPAPEPNLTVLWSEKLPQNFKEFCAKVSIASSAVQYENDEIMRPYFGDDYGIACCVSAMEIGKQMQFFGARANLAKALLYAINGGVDEVTKDQVGPKYEPITSEYLDYDEVVEKYDQMTEWLAGLYINTLNVIHYMHDKYSYESLEMALHDTEVLRTMATGIAGFSVAADSLSAIKYADVKVIRDEDGLAVDFEIEGDYPKYGNNDERVDSIAVNLLEKFMEKVTHYDTYRNSKHTTSILTITSNVVYGKKTGNTPDGRRYGDPFAPGANPLHGRDSNGALASLNSVAKLPYKYSLDGISNTFSIVPGALGKDEVTQKQNLATMLDGYSNKGGHHLNVNVMNRSTLEDAMEHPEEYPQLTIRVSGYAVNFIKLTREQQLDVINRTFHESM

SEQ ID NO: 3989 - DNA, 759 bp, Alloiococcus otitidis
  CDS (13)..(756)
aggggtatgagtatgacagaagaaaacattggctatgtccactcgacagaaagtttcggtacagttgatggcccaggcattcgctttgtggtctttatgcaaggttgccggatgcggtgtgagttctgtcataaccccgatacttggaatattgggaccgggaccccttatacggcccaagaaatgttcgacaaggctattgactacaaggaatattggggcgacaagggtgggatcaccgtctctggcggtgaacctatgctccatattgatttcctgattgacttcttcaaattggccaaagaacacggtgttcacaccaccttggatacttgtggccagccctttaccaaggatgaacccttttacagtcgctttgacgagctgatgcagtatacggacctcgtcttaatggacatcaagcatatcgacagtgacttccaccgtaagtatactggccatcccaatgaaaatatcctggccatggctaaagacctgtcagagcgaggaattccaatgtggattagacacgttttagtccctggccggtcagattttgaccaagacttggaaaaattgagccggtttatcgaccaattgggctcagtggacaaggttgaggttttaccttaccacaaattaggggtttacaagtatgaagaattgggaatcccttataaattagaagggactgaaccccctagcccagaacgggttgaaaatgcccaacgaatcctaaaaaccaaaaaatatcaataa

SEQ ID NO: 3990 - protein, 248 aa, Alloiococcus otitidis
MTEENIGYVHSTESFGTVDGPGIRFVVFMQGCRMRCEFCHNPDTWNIGTGTPYTAQEMFDKAIDYKEYWGDKGGITVSGGEPMLHIDFLIDFFKLAKEHGVHTTLDTCGQPFTKDEPFYSRFDELMQYTDLVLMDIKHIDSDFHRKYTGHPNENILAMAKDLSERGIPMWIRHVLVPGRSDFDQDLEKLSRFIDQLGSVDKVEVLPYHKLGVYKYEELGIPYKLEGTEPPSPERVENAQRILKTKKYQ

SEQ ID NO: 3991 - DNA, 759 bp, Alloiococcus otitidis; identical to SEQ ID NO: 3989
  CDS (7)..(756)

SEQ ID NO: 3992 - protein, 250 aa, Alloiococcus otitidis
MSMTEENIGYVHSTESFGTVDGPGIRFVVFMQGCRMRCEFCHNPDTWNIGTGTPYTAQEMFDKAIDYKEYWGDKGGITVSGGEPMLHIDFLIDFFKLAKEHGVHTTLDTCGQPFTKDEPFYSRFDELMQYTDLVLMDIKHIDSDFHRKYTGHPNENILAMAKDLSERGIPMWIRHVLVPGRSDFDQDLEKLSRFIDQLGSVDKVEVLPYHKLGVYKYEELGIPYKLEGTEPPSPERVENAQRILKTKKYQ

SEQ ID NO: 3993 - DNA, 192 bp, Alloiococcus otitidis
  CDS (1)..(189)
atgaaaatagtaattgcgagtaaattagccttgattgccttattggtctatttcttccttgaccctcaagtattcttaacaaatgggtttataggtgtcgatggagctgttgtctgccgaggcttagccttggtctttgccgtaaaaatgacctatgacctggttgaagatatctacaatgaatatcattaa

SEQ ID NO: 3994 - protein, 63 aa, Alloiococcus otitidis
MKIVIASKLALIALLVYFFLDPQVFLTNGFIGVDGAVVCRGLALVFAVKMTYDLVEDIYNEYH

SEQ ID NO: 3995 - DNA, 360 bp, Alloiococcus otitidis
  CDS (25)..(357)
cccttgtcttcattttccttggccatggcctctaacaattcttcttttcttgctaggagttcttcaaagtcgaccacattgacctggcctactctgacttggtgtccgtttaagtcaaagcttttggcatcgccgtcaacaatctctaaagctgacttgccttcattgttcgtaccagacttaagcatttccaagccgtatgactctaagtcaatttcggctaggtcagctaattcttgggctgcttcttggtcttcttctgtgcaggttggcgatttgaaaagcaaggtgtctgaaactatagctgacagcattaagccagcaatatttttagggatctcaatattattttccttgtag

SEQ ID NO: 3996 - protein, 111 aa, Alloiococcus otitidis
MASNNSSFLARSSSKSTTLTWPTLTWCPFKSKLLASPSTISKADLPSLFVPDLSISKPYDSKSISARSANSWAASWSSSVQVGDLKSKVSETIADSIKPAIFLGISILFSL

SEQ ID NO: 3997 - DNA, 360 bp, Alloiococcus otitidis; identical to SEQ ID NO: 3995
  CDS (4)..(357)

SEQ ID NO: 3998 - protein, 118 aa, Alloiococcus otitidis
MSSFSLAMASNNSSFLARSSSKSTTLTWPTLTWCPFKSKLLASPSTISKADLPSLFVPDLSISKPYDSKSISARSANSWAASWSSSVQVGDLKSKVSETIADSIKPAIFLGISILFSL

SEQ ID NO: 3999 - DNA, 819 bp, Alloiococcus otitidis
  CDS (124)..(816)
gataggggagtagaccattatgtgaggagaattattgtgagtaaagttttagtttttggccacaagagcccagataccgatgccattacctcagccattgcctattcccacctgcaaaagcagttgggttatgacactgaagcggttgccctaggagagccttcagccgaaacccagtttgtcttggattattttggttatgaagctcctagagtggtgaccaagtcagatgaagacgttagccaagtaagcctggttgaccacaatgaacccagccaaagtattgacgacttagaagacttaactgttctttcagttgtggaccaccaccgcatccataattttaatacttccggccccctatactaccgggcagaaccggttggctgtactaatacgattatcctaaaactctacaaggaaaataatattgagatccctaaaaatattgctggcttaatgctgtcagctatagtttcagacaccttgcttttcaaatcgccaacctgcacagaagaagaccaagaagcagcccaagaattagctgacctagccgaaattgacttagagtcatacggcttggaaatgcttaagtctggtacgaacaatgaaggcaagtcagctttagagattgttgacggcgatgccaaaagctttgacttaaacggacaccaagtcagagtaggccaggtcaatgtggtcgactttgaagaactcctagcaagaaaagaagaattgttagaggccatggccaaggaaaatgaagacaagggttatgagcttttcctcttgctgatcaccaatatcttagacgagtga

SEQ ID NO: 4000 - protein, 231 aa, Alloiococcus otitidis
MGYDTEAVALGEPSAETQFVLDYFGYEAPRVVTKSDEDVSQVSLVDHNEPSQSIDDLEDLTVLSVVDHHRIHNFNTSGPLYYRAEPVGCTNTIILKLYKENNIEIPKNIAGLMLSAIVSDTLLFKSPTCTEEDQEAAQELADLAEIDLESYGLEMLKSGTNNEGKSALEIVDGDAKSFDLNGHQVRVGQVNVVDFEELLARKEELLEAMAKENEDKGYELFLLLITNILDE

SEQ ID NO: 4001 - DNA, 819 bp, Alloiococcus otitidis; identical to SEQ ID NO: 3999
  CDS (37)..(816)

SEQ ID NO: 4002 - protein, 260 aa, Alloiococcus otitidis
MSKVLVFGHKSPDTDAITSAIAYSHLQKQLGYDTEAVALGEPSAETQFVLDYFGYEAPRVVTKSDEDVSQVSLVDHNEPSQSIDDLEDLTVLSVVDHHRIHNFNTSGPLYYRAEPVGCTNTIILKLYKENNIEIPKNIAGLMLSAIVSDTLLFKSPTCTEEDQEAAQELADLAEIDLESYGLEMLKSGTNNEGKSALEIVDGDAKSFDLNGHQVRVGQVNVVDFEELLARKEELLEAMAKENEDKGYELFLLLITNILDE

SEQ ID NO: 4003 - DNA, 819 bp, Alloiococcus otitidis; identical to SEQ ID NO: 3999
  CDS (22)..(816)

SEQ ID NO: 4004 - protein, 265 aa, Alloiococcus otitidis
MRRIIVSKVLVFGHKSPDTDAITSAIAYSHLQKQLGYDTEAVALGEPSAETQFVLDYFGYEAPRVVTKSDEDVSQVSLVDHNEPSQSIDDLEDLTVLSVVDHHRIHNFNTSGPLYYRAEPVGCTNTIILKLYKENNIEIPKNIAGLMLSAIVSDTLLFKSPTCTEEDQEAAQELADLAEIDLESYGLEMLKSGTNNEGKSALEIVDGDAKSFDLNGHQVRVGQVNVVDFEELLARKEELLEAMAKENEDKGYELFLLLITNILDE

SEQ ID NO: 4005 - DNA, 381 bp, Alloiococcus otitidis
  CDS (79)..(378)
aaattaattataagaacattgattaagccctttatttgtgaaataatgtctataaggaaaaacaaatggggtggtagaatgttcagaaaaaaccggtgggatcatttcttttatccaggtttaatcttggttgctcttggcgctttgttgctggtggctttccaggctagtggtgccttagaaagccaaaaggttgaagcagaacgtcaagaagccatcgaacaagcgcaagaacaagaaaccgatgtcgacactgaagcgacagaagatggcgattgggatgaaactagttcaagtgatgcggatagccaagccagtgaagatggtgattgggaagaagaaagtgatgcctcaagtggtgcccctgaagatggtgtctga

SEQ ID NO: 4006 - protein, 100 aa, Alloiococcus otitidis
MFRKNRWDHFFYPGLILVALGALLLVAFQASGALESQKVEAERQEAIEQAQEQETDVDTEATEDGDWDETSSSDADSQASEDGDWEEESDASSGAPEDGV

SEQ ID NO: 4007 - DNA, 381 bp, Alloiococcus otitidis; identical to SEQ ID NO: 4005
  CDS (46)..(378)

SEQ ID NO: 4008 - protein, 111 aa, Alloiococcus otitidis
MSIRKNKWGGRMFRKNRWDHFFYPGLILVALGALLLVAFQASGALESQKVEAERQEAIEQAQEQETDVDTEATEDGDWDETSSSDADSQASEDGDWEEESDASSGAPEDGV

SEQ ID NO: 4009 - DNA, 381 bp, Alloiococcus otitidis; identical to SEQ ID NO: 4005
  CDS (19)..(378)

SEQ ID NO: 4010 - protein, 120 aa, Alloiococcus otitidis
MIKPFICEIMSIRKNKWGGRMFRKNRWDHFFYPGLILVALGALLLVAFQASGALESQKVEAERQEAIEQAQEQETDVDTEATEDGDWDETSSSDADSQASEDGDWEEESDASSGAPEDGV

SEQ ID NO: 4011 - DNA, 369 bp, Alloiococcus otitidis
  CDS (37)..(366)
agaaaagtccccaatttgacccataggaggtataacatgaatcaaatgactatttttgacccagccatgtgctgttcaaccggagtatgtgggccttctgtcgacaaaaacttactccgagtggctactattattgataacttggaccaaaatggggttaaggttacccggcacaaccctgccagtgatcctaaaatatttatccaaaaccaaaccatcaaaaagttgttaaataaaaaaggggtcgatatcctaccagtcactgttgtcaatgatgaggttgtcaagacaaaagactatcctagcgaccaggaatttatccaatatttagacgtaccagaagactatattaaggcaaaagcacactaa

SEQ ID NO: 4012 - protein, 110 aa, Alloiococcus otitidis
MNQMTIFDPAMCCSTGVCGPSVDKNLLRVATIIDNLDQNGVKVTRHNPASDPKIFIQNQTIKKLLNKKGVDILPVTVVNDEVVKTKDYPSDQEFIQYLDVPEDYIKAKAH

SEQ ID NO: 4013 - DNA, 369 bp, Alloiococcus otitidis; identical to SEQ ID NO: 4011
  CDS (16)..(366)

SEQ ID NO: 4014 - protein, 117 aa, Alloiococcus otitidis
MTHRRYNMNQMTIFDPAMCCSTGVCGPSVDKNLLRVATIIDNLDQNGVKVTRHNPASDPKIFIQNQTIKKLLNKKGVDILPVTVVNDEVVKTKDYPSDQEFIQYLDVPEDYIKAKAH

SEQ ID NO: 4015 - DNA, 1785 bp, Alloiococcus otitidis
  CDS (43)..(1782)
ggcaaaagcacactaatcgccagcaaggcgaggagggaaattatgtttaaagaactgaacttggaaaatatggacttgaataagtatctatttttcaccggcaagggaggcgtcggtaaaacttcaattgcctcagccattgctgttaaattagcagacttgggtaagaatatccttttagtttcgactgacccagcttcaaacttgcaggatatttttgagaccgacttggacaacaagggggttaaaatcaaccaagtccccggtttaactgtgaccaacttagaccctaaccaggcagctcaagaatataaggatagtgtgatcggtccttataaaggtgacctgccccaagccatggttgataatttggaagaacaactttctggtccttgtaccgttgaaattgctgcttttaatgaattttcttcctttattactgacaaagaagctgcttcagcctacgaccacatcctctttgatacagctcccacaggtcatactttgcgaatgttgcaattgccatcagcttgggctagctttattgaccagtctgaacacggagcttcctgcctaggccaattgtctggtttagaagataagaaaggcctctaccaagaagcagtggccaacttagctgatggcgaccgaacaagcctctttttggtcgccagaccggaagagccagccctgaaagaaggggagagagctagtctggaattaaaagaggtcgggatgaaccaacaaatattgattattaatgggctcctaacttcatgtgatgacgacttgtctcaggctatttatgatagccaggggcgagctttggacaatatgccagaaaacttgctagacttgcccacctaccaagttcccttgaaggctaataacatgactggtatcaataacttacgagcctttttccaagaccaggctccccaagacctggaaaccggggccgttagacctgacttatcaggtttgaatgccgtcattcaagacctttatgataaggataagaaggtcatcttcactatggggaaagggggagttggcaagacaacgattgccgcaacagttgccattgaactggctaaaaaaggcaagaaagttcacttaaccacaactgaccccgctgaccacctgtccaacgtgatcgatggcgattatggaattaccatcagccacattgaccaagaccaagtgctggctgactaccaagaagaagtcttatcctctgctagacaagacttgtctgaagacgacttagactacattaaggaagacttgagaagtccatgtactcaagagattgccgtcttccgggcctttgctgagattgttgaccgatctcaagacgaagtggttgtgatcgacacagccccaacgggtcataccttattgctcttagagtctacccagtcctataaccaagaaattgcccggacccaaggccaagttccagaggcagtccaaagactactcccagttttgaccgataaaaaccagacagaagtcatcattgtcagcctagctgaagcaaccccttactatgaagctaaacgcttacaagaagatcttacaagagccaatatatactccaagtggtgggtggtcaattccagtttctatgctagccaacccagtaatgatgtcttaaaagctcgggctaacaatgaaatagaatggatcaataaaatagaccaggaatctgatggtcacttagccttgctcaagtgggaggtccaagacttgaaaggcaagaagcttgaggtcttgttataa

SEQ ID NO: 4016 - protein, 580 aa, Alloiococcus otitidis
MFKELNLENMDLNKYLFFTGKGGVGKTSIASAIAVKLADLGKNILLVSTDPASNLQDIFETDLDNKGVKINQVPGLTVTNLDPNQAAQEYKDSVIGPYKGDLPQAMVDNLEEQLSGPCTVEIAAFNEFSSFITDKEAASAYDHILFDTAPTGHTLRMLQLPSAWASFIDQSEHGASCLGQLSGLEDKKGLYQEAVANLADGDRTSLFLVARPEEPALKEGERASLELKEVGMNQQILIINGLLTSCDDDLSQAIYDSQGRALDNMPENLLDLPTYQVPLKANNMTGINNLRAFFQDQAPQDLETGAVRPDLSGLNAVIQDLYDKDKKVIFTMGKGGVGKTTIAATVAIELAKKGKKVHLTTTDPADHLSNVIDGDYGITISHIDQDQVLADYQEEVLSSARQDLSEDDLDYIKEDLRSPCTQEIAVFRAFAEIVDRSQDEVVVIDTAPTGHTLLLLESTQSYNQEIARTQGQVPEAVQRLLPVLTDKNQTEVIIVSLAEATPYYEAKRLQEDLTRANIYSKWWVVNSSFYASQPSNDVLKARANNEIEWINKIDQESDGHLALLKWEVQDLKGKKLEVLL

SEQ ID NO: 4017 - DNA, 2316 bp, Alloiococcus otitidis
  CDS (16)..(2313)
aaaggttggagatggatgacccaagatgcgattgtcttaaaaggtgttaaggtaaacaatctcaaaaacctgaatttagaaataccaaaaaatcaattagttgtcgtcaccggtgtttctggatcaggtaagtcttccttggtttttgacactattgctgccgagtccaaacggcaaatgaacaaaaactaccccatgtatttaagaagacggatggagttgattgaaagacccgatgcccaagaaatgaccaatttgaccccatctttagtcatcaaccaaaagaatttgactggtggaagtcggtctaacgtccaaaccgccttagacctggctcccttgatccggctcttgttttcccggattggccagcccagtgtgggagaagcatctgcttaccggaagaatgaccctcaaggcaggtgtgaccagtgccagggcaggggggagatccgccaggttgacaaggaagccttggtgaacccagaatctactttagcagagaatggcattaattttaaacccattggcgggtcttggcagaagtcaatttttgttgagtccggcctctttgatcctgacaaaaaattgaaagactatagtaaaaaagagtggcataacctcctctatggacccgaccaagactataaagtattctttaatagtgacaaaactggccagtcgtttaccgaaacttacgagggcctaattccccgctttgaacgactctatttaaaccgggatatttcacgactttctaaaaaagttcaagaggaaacagaagctaaaattatcagccagccttgccctaaatgccaggcttctggctacagccaagaagttttgcattcaaccattaacggctgcaatattgtcgactattcccagatggaaatggaccaattaagccaagaattgcaaaaagttgaaggtcagatgggggaaggactggcccagcaaatcctcaccgttgtcaagaccatggaagaggcaggaattggctacttaactcttgaccgtcctatctctagcctgtctggaggggaacgacaacggctaaaactggtggccaacttgacctctagcttaaacaatatgacctatatcctagatgaaccctctgcaggactccacccttatgatagccggaaaattaaagacctcctgctagagataaaagccaatcataactctttaattgtggttgaacacaaccgagacattatggccatggcagattggatcattgacatgggaccaaaagccggatccaaaggaggtcaagtgatttttcaaggtcgctaccaagacctcttagagtctgataccaagactggtcaatatttaagacgtccacagcaatttgccgagccaggcgtccaaaactttgaagaatttatccaggtggaaggagctagccacaataatttaaaaaatatcgacgttaagtttcctctaggagcctttagcatggtcactggcctggccggatctggcaaaacctccctaatccagggagaggtcttaaaggcttatccccaagctatctacctgtcccaagctggtattggcatttcttcacggtccacgcctgctacctatcttaatattatggacaagatccggaatttatttgcccaagaaaatgaagttgacccgggcttgttttcctttaactccaaaggggcttgcccggtttgtggcggcaagggagtccttgaacccgatgtagcctttgcagaccccatcagttttgtctgcgaccattgccagggaacacgctattccaatgaggcccggacttacacctaccagggtcagtcaatagtcgacgtcctcaatttaacagtcaatgacgcattagatttttttgctggccaggaaaaaattacccagccattaagcttgctagaagacgttggcttagactacctaacactaggccaggccacctcaagtctttctggtggtgaactccagcggttaaaactagggtcagaactgcaaaaagaggggaaaatttatatcctagacgaacccagctctggtttacacctagctgacgttgaccaattgctgaacttaattcattaccttatccaacaaggtaatactgttattgccattgaccaccacgctagtctcatgctagatgctgattggttagttgacctagggccgggaccaggacgacaaggcggtgacttgctttaccaaggcccagccaagggtatcctaaatgttcaggagtcgtatactgggcagtatttgaaagagattactcaaggagataataagcaatcatttgacggatga

SEQ ID NO: 4018 - protein, 766 aa, Alloiococcus otitidis
MTQDAIVLKGVKVNNLKNLNLEIPKNQLVVVTGVSGSGKSSLVFDTIAAESKRQMNKNYPMYLRRRMELIERPDAQEMTNLTPSLVINQKNLTGGSRSNVQTALDLAPLIRLLFSRIGQPSVGEASAYRKNDPQGRCDQCQGRGEIRQVDKEALVNPESTLAENGINFKPIGGSWQKSIFVESGLFDPDKKLKDYSKKEWHNLLYGPDQDYKVFFNSDKTGQSFTETYEGLIPRFERLYLNRDISRLSKKVQEETEAKIISQPCPKCQASGYSQEVLHSTINGCNIVDYSQMEMDQLSQELQKVEGQMGEGLAQQILTVVKTMEEAGIGYLTLDRPISSLSGGERQRLKLVANLTSSLNNMTYILDEPSAGLHPYDSRKIKDLLLEIKANHNSLIVVEHNRDIMAMADWIIDMGPKAGSKGGQVIFQGRYQDLLESDTKTGQYLRRPQQFAEPGVQNFEEFIQVEGASHNNLKNIDVKFPLGAFSMVTGLAGSGKTSLIQGEVLKAYPQAIYLSQAGIGISSRSTPATYLNIMDKIRNLFAQENEVDPGLFSFNSKGACPVCGGKGVLEPDVAFADPISFVCDHCQGTRYSNEARTYTYQGQSIVDVLNLTVNDALDFFAGQEKITQPLSLLEDVGLDYLTLGQATSSLSGGELQRLKLGSELQKEGKIYILDEPSSGLHLADVDQLLNLIHYLIQQGNTVIAIDHHASLMLDADWLVDLGPGPGRQGGDLLYQGPAKGILNVQESYTGQYLKEITQGDNKQSFDG

SEQ ID NO: 4019 - DNA, 1035 bp, Alloiococcus otitidis
  CDS (493)..(1032)
agcatgccagccacgccaaaatttaaggaaagaaggaccaagatgatcaaaatgaaccgcaataccagccccatatctccctttcaacctgcccatatccaaagagccctggagaagacccaggtcaaccaatatccaggagctgaacttgaccgatttaaggaaaattacagccgactaaccggtctgcctagtgaccaaatagcagtggccaatggttcagatgaatgggtcaaacgcttagtccgtttttttggaggtcacgggcccatcctaactttttacccggactttatcatgtacttcaaatattcccgccaataccaggttgatttacggtccattccagctgatgaaagctttgacttccatattgatcaagccctagaccgcattcaaaaagtcaaacctaagctatttattttctcaagccccaacaacccaaccggcaaacaattttctcaaactgaaatccaggccctggctgataggatgatagaaataggaggctacctggttatcgatgaagcctatattgaatttggccaggactacaagcgaccgacaggcagccatgtcctcatcttgcgaaccatgtctaaaatgtatgggatggccggccttcgtttggggattctttatgggaagggagacatatttgaccaggttactggtctcggtaaaagtccctttccgattagtcatttaaacttaaatttagctagtgaattcatggaggatacaaatcatttaaaagattttattaactaccagctggagtctagaaagaccctagttgagaccatggctaaggtcaagaacttggtaaatattaaagaaacagctgctaactttacctttacctatggcagtaaggcccaagacttagcccgctatctaggtcaaaaaggctatgttattggttcttttgacgatgaccccttaaaacaagcctttcgctattccattatccaaaacaaggactatccaagactagccatggatttagaagaatggaaggcaggtaatgtttaa

SEQ ID NO: 4020 - protein, 180 aa, Alloiococcus otitidis
MIEIGGYLVIDEAYIEFGQDYKRPTGSHVLILRTMSKMYGMAGLRLGILYGKGDIFDQVTGLGKSPFPISHLNLNLASEFMEDTNHLKDFINYQLESRKTLVETMAKVKNLVNIKETAANFTFTYGSKAQDLARYLGQKGYVIGSFDDDPLKQAFRYSIIQNKDYPRLAMDLEEWKAGNV

SEQ ID NO: 4021 - DNA, 1035 bp, Alloiococcus otitidis; identical to SEQ ID NO: 4019
  CDS (4)..(1032)

SEQ ID NO: 4022 - protein, 343 aa, Alloiococcus otitidis
MPATPKFKERRTKMIKMNRNTSPISPFQPAHIQRALEKTQVNQYPGAELDRFKENYSRLTGLPSDQIAVANGSDEWVKRLVRFFGGHGPILTFYPDFIMYFKYSRQYQVDLRSIPADESFDFHIDQALDRIQKVKPKLFIFSSPNNPTGKQFSQTEIQALADRMIEIGGYLVIDEAYIEFGQDYKRPTGSHVLILRTMSKMYGMAGLRLGILYGKGDIFDQVTGLGKSPFPISHLNLNLASEFMEDTNHLKDFINYQLESRKTLVETMAKVKNLVNIKETAANFTFTYGSKAQDLARYLGQKGYVIGSFDDDPLKQAFRYSIIQNKDYPRLAMDLEEWKAGNV

SEQ ID NO: 4023 - DNA, 1035 bp, Alloiococcus otitidis
  CDS (7)..(1032)
cttataatgggggttgaaaggattgataacatgagactaagtgtccacgacttgatgacttataaagatggtgaaacaccagaagaagtttatgaccggacccgtcaatttgttcaagaaattgacaaattgaactatacccgctattggtttgctgaacaccacaatacaacttactacgcctctgtatcacctgaattaatagctacccacatgtcagcattaactgacaacttacgtttggggactggtgggaccatgattatgcactattccccgcttaaaattgctgaaaatgtcagaaccatggatgccttggcacctggtcgggctgacatcggtcttggccgggcaccgggagctggccccaacgaaatcttagccttggctgaaggccagtcccagacttttgacgacctttacaacaaggtccaagtcattctagactacttgagtgatgaaaaaccggaacgattttacggtcgaacagaagctgcccctaaaggtttaagccacctgccccaaccttggatgctggggtcttctggccagtcagctacaaaaacagcagaactcggtttgggttacagttttgccaagttctttggcattgaaaccgatccggaaattttcaaactttaccggaataatttcaagccttctgttttctttgacaagcctgaaatcattgtttcttatatgattattgtcgctgatacagaagaagaagccttctaccacttcaaaccagtgatcatgaacttgatgtccatccgggctggtaaaatgatccccattcaccaccctgaccaagttaaagattatgaatttagccaagaagagcaggccttcgttgaccgctacctggataaacgctttgcggttgttggcagcaaggaacaagtcaaagaaatactggaagatgaagttgataaacttggtatcgacgaaatcatggcctactcccctatctatgacaatgaagctagggtggcctcttaccgtaagctagcggaaatttttgatcttgtttaa

SEQ ID NO: 4024 - protein, 342 aa, Alloiococcus otitidis
MGVERIDNMRLSVHDLMTYKDGETPEEVYDRTRQFVQEIDKLNYTRYWFAEHHNTTYYASVSPELIATHMSALTDNLRLGTGGTMIMHYSPLKIAENVRTMDALAPGRADIGLGRAPGAGPNEILALAEGQSQTFDDLYNKVQVILDYLSDEKPERFYGRTEAAPKGLSHLPQPWMLGSSGQSATKTAELGLGYSFAKFFGIETDPEIFKLYRNNFKPSVFFDKPEIIVSYMIIVADTEEEAFYHFKPVIMNLMSIRAGKMIPIHHPDQVKDYEFSQEEQAFVDRYLDKRFAVVGSKEQVKEILEDEVDKLGIDEIMAYSPIYDNEARVASYRKLAEIFDLV

SEQ ID NO: 4025 - DNA, 1008 bp, Alloiococcus otitidis
  CDS (679)..(1005)
tgttttaaagataactatccttatcttcagtctggctaccggtttaattccctagcccaaaatatttatgttatctacctccttcgttttatagcgggtattggggtaggtggcgaatatggagttgccatctccgttatggccggtatcgttcctctcgaaaagatgggtcgagtttcttccttaaacgggatagtcggccagctaggcagtattgtttcagccctcctagctgccctagttgctccattttttggctggcggggcttgtttttaatgggcctcctacctattcttttggtcgtctgggctcaatttttcatcaagtccgaccaaattaccgaagatgacctgggggagaagctagaggcaaaagcaagtcaagctagcatcaaagacttgtttgccagcaagaatttaaccaggctcaccctatccttaatgattatggcgactgttcaaatagctggttattttggcatgatgaactggttgccgaccatgatgcaaagtcagttaggaatttcagttggggattcctcccagtggatggtagctaccatcctaggcatgtgcttaggaatgctcgtcttcggtcagattttcgaccgaatcggccctcgcaaaagttttgccatctttttaaccctttcagccttatccgtttaccttttcaccttggtccaaactggattagccatgattatcgggggagccatcgttggtttctttgttaacggcatgttcaccggttatgctgcagtgaccacccaactctatccccaacgaatccggactattgctaataataccatcttaaacgttggacgggctgtcggaggtttttcttccgtcatcattggcttcatcttagagcgctcgggggtctctatggttatgttcttcctagctggcctctacatcatctctcttatcaccatgctgtctatccctcaattaaaaggagacatgtatgcgaaattagtccaagccatgaacaaccactaa

SEQ ID NO: 4026 - protein, 109 aa, Alloiococcus otitidis
MVQTGLAMIIGGAIVGFFVNGMFTGYAAVTTQLYPQRIRTIANNTILNVGRAVGGFSSVIIGFILERSGVSMVMFFLAGLYIISLITMLSIPQLKGDMYAKLVQAMNNH

SEQ ID NO: 4027 - DNA, 1008 bp, Alloiococcus otitidis; identical to SEQ ID NO: 4025
  CDS (571)..(1005)

SEQ ID NO: 4028 - protein, 145 aa, Alloiococcus otitidis
MCLGMLVFGQIFDRIGPRKSFAIFLTLSALSVYLFTLVQTGLAMIIGGAIVGFFVNGMFTGYAAVTTQLYPQRIRTIANNTILNVGRAVGGFSSVIIGFILERSGVSMVMFFLAGLYIISLITMLSIPQLKGDMYAKLVQAMNNH

SEQ ID NO: 4029 - DNA, 1008 bp, Alloiococcus otitidis; identical to SEQ ID NO: 4025
  CDS (139)..(1005)

SEQ ID NO: 4030 - protein, 289 aa, Alloiococcus otitidis
MAGIVPLEKMGRVSSLNGIVGQLGSIVSALLAALVAPFFGWRGLFLMGLLPILLVVWAQFFIKSDQITEDDLGEKLEAKASQASIKDLFASKNLTRLTLSLMIMATVQIAGYFGMMNWLPTMMQSQLGISVGDSSQWMVATILGMCLGMLVFGQIFDRIGPRKSFAIFLTLSALSVYLFTLVQTGLAMIIGGAIVGFFVNGMFTGYAAVTTQLYPQRIRTIANNTILNVGRAVGGFSSVIIGFILERSGVSMVMFFLAGLYIISLITMLSIPQLKGDMYAKLVQAMNNH

SEQ ID NO: 4031 - DNA, 291 bp, Alloiococcus otitidis
  CDS (19)..(288)
aagaaggagtcgaccaagatgaaaagtaatgataaaagagcctttatggtttccctgattggggcaggactagatgatgtcaatgtcatgttcttatccttttccctgtctacgattatctccgaacttagtctaagtggttcccaggcaggctggattggaacgatcaccaatctggggatgcttttaggtggcctagtatttggggtcttgggggaccgttatcataggtttaatgttttaaagataactatccttatcttcagtctggctaccggtttaattccctag

SEQ ID NO: 4032 - protein, 90 aa, Alloiococcus otitidis
MKSNDKRAFMVSLIGAGLDDVNVMFLSFSLSTIISELSLSGSQAGWIGTITNLGMLLGGLVFGVLGDRYHRFNVLKITILIFSLATGLIP

SEQ ID NO: 4033 - DNA, 651 bp, Alloiococcus otitidis
  CDS (133)..(648)
atgacagcaaacaaggctaaggcagttgctaagacattgctagagattggggcggtttcacttagtcccgaccagccttttacctggtcaagtggtcttaaaacaccgatctattgcgataaccgtttaataatgagccagccccaagccagggacttgatcgaagacagtctggtggacttgatccagagccaccacccagatgtggaagtgattgccgggactgcaacggccggcattccccatgctgcctttatagcagaccgattaaatttacctatgatttatgtccggtccagcaaaaaaggacatggcaagcagaatgctattgaaggcagtttccataaagggcaaaaggtggtcatggtggaggacttaatctcaactggcggcagtgtcatccaagcggcccacaaggtcagccaagctggaggacaaattttgggtgtagttgccatctttacttacggtctagcaagtggtcaggaagcctttaaccaagtcgactaccccctccacaccttaactgattacccctcattggtggactatgctgttcaaaaccatgacttcaagtcccaagaaagaaccctcaaggcctggtaccaagaccctgaagcctggtctgacagggccaaacaagctaattag

SEQ ID NO: 4034 - protein, 172 aa, Alloiococcus otitidis
MSQPQARDLIEDSLVDLIQSHHPDVEVIAGTATAGIPHAAFIADRLNLPMIYVRSSKKGHGKQNAIEGSFHKGQKVVMVEDLISTGGSVIQAAHKVSQAGGQILGVVAIFTYGLASGQEAFNQVDYPLHTLTDYPSLVDYAVQNHDFKSQERTLKAWYQDPEAWSDRAKQAN

SEQ ID NO: 4035 - DNA, 651 bp, Alloiococcus otitidis; identical to SEQ ID NO: 4033
  CDS (1)..(648)

SEQ ID NO: 4036 - protein, 216 aa, Alloiococcus otitidis
MTANKAKAVAKTLLEIGAVSLSPDQPFTWSSGLKTPIYCDNRLIMSQPQARDLIEDSLVDLIQSHHPDVEVIAGTATAGIPHAAFIADRLNLPMIYVRSSKKGHGKQNAIEGSFHKGQKVVMVEDLISTGGSVIQAAHKVSQAGGQILGVVAIFTYGLASGQEAFNQVDYPLHTLTDYPSLVDYAVQNHDFKSQERTLKAWYQDPEAWSDRAKQAN

SEQ ID NO: 4037 - DNA, 744 bp, Alloiococcus otitidis
  CDS (19)..(741)
ctaaagggaggaagcaaaatggatcaaaccaagcctattattgctcttgactttaaccacaaaaagcaaatccgtgatttcctagccttatttgctgatgaaaaattaaatatcaaaattgggatggaagccttctatgccaatggtccaaatatcgtgcatgaactgatccaaggtcagcacgatatttttttggacttaaaacttcacgacatccctaacacagtcaaaaaggccatgaaagtcttagcccagttgggggtggcgatggtcaatgtccatgcccaaggtggactgaagatgatggaggctgctaaagcaggtttagaagaaggatgtaaggggaggggagaccggccgaaattaattgccgtcacccagttgacctccctttctgaggaagacttctcaagggaccaggtgtcaacccttagtctagaagactccatcaaccactttgcccgcctggccaaggaggctggcttagacggagtggtgtgctctccactggaatcctctagaatacacaaggaacttggtccagacttcttaaccgtcacaccaggcatccggcttaaaacagaccagggagatgaccaaagccggattacaacacctagccaggcccgaacttaccagagtgactatatcgtagtgggccggcctatcacccaagccaaggatccaaggctagcctatgaacaaatgtaccaagcatggaataaacaaaaaggagagagataa

SEQ ID NO: 4038 - protein, 241 aa, Alloiococcus otitidis
MDQTKPIIALDFNHKKQIRDFLALFADEKLNIKIGMEAFYANGPNIVHELIQGQHDIFLDLKLHDIPNTVKKAMKVLAQLGVAMVNVHAQGGLKMMEAAKAGLEEGCKGRGDRPKLIAVTQLTSLSEEDFSRDQVSTLSLEDSINHFARLAKEAGLDGVVCSPLESSRIHKELGPDFLTVTPGIRLKTDQGDDQSRITTPSQARTYQSDYIVVGRPITQAKDPRLAYEQMYQAWNKQKGER

SEQ ID NO: 4039 - DNA, 1083 bp, Alloiococcus otitidis
  CDS (1)..(1080)
atgtttaaggtacttggaatccaaatcaaacgcctgttgaaaaacccagttatgtttctggttaattttggcttgaccctggcctttgttcttgtcataggggccagtcaagaaccagctcaaattcaagtttcaacctacacgagtgacctccaccagtccgatttaaaccagacagtcgagaacttaaaccaaaacgattcctttaactttgaaatcatccaagctgaccaggcaagagaagatttgcggatgaaccgagttccctttgtcttagaccttcaaaaaaacgactacaccttgtgggtggctagagaagatggacaggtcgacctggtcgataactatctcaaacaaaaactaggacaggaagaaagcattagacaggtccgtgaccaattcccccaggctgaaatcgaccttacccctacgataaacttagaaaaccaatacctagaaggagaggggcaaggggggcaagcctatcaatttcaagccttaatcggacaaagcttgttctttgtcaccctcactgtctttttcttacagtcccagcttcttgaagaaaggacttctggggtttggagccggctgattgtctcccccttgtctaaggtgcagatttaccttggcaacctagtccactattacctggcaggggtcctccaattggtcttatcattcatcatcttaaccaggctgctaggcatcgagtttggtcctggtatttatcctatggcagttgttatcttagtctttctcttcgccatcgtagctttaggcatcctcctagtcagtattagccccagcttgacagccttaaatgccttgatccctattgtgactgtagccatggccatgttaggcggagccttttggccactagagattgtatccaaccgcttcttattaactttagcagaatttatccccattaaacatgccatgcaaggggccttatctgctataaatggtcagctagagctaggagacctgggccaggttattcttatcttagccctcatgggtgttctctttatgggggtaggattgaatttaatggaaaggcagaggggacagtaa

SEQ ID NO: 4040 - protein, 360 aa, Alloiococcus otitidis
MFKVLGIQIKRLLKNPVMFLVNFGLTLAFVLVIGASQEPAQIQVSTYTSDLHQSDLNQTVENLNQNDSFNFEIIQADQAREDLRMNRVPFVLDLQKNDYTLWVAREDGQVDLVDNYLKQKLGQEESIRQVRDQFPQAEIDLTPTINLENQYLEGEGQGGQAYQFQALIGQSLFFVTLTVFFLQSQLLEERTSGVWSRLIVSPLSKVQIYLGNLVHYYLAGVLQLVLSFIILTRLLGIEFGPGIYPMAVVILVFLFAIVALGILLVSISPSLTALNALIPIVTVAMAMLGGAFWPLEIVSNRFLLTLAEFIPIKHAMQGALSAINGQLELGDLGQVILILALMGVLFMGVGLNLMERQRGQ

SEQ ID NO: 4041 - DNA, 1302 bp, Alloiococcus otitidis
  CDS (1045)..(1299)
ctggccgccgattgcgggattaggagggttagtatgtttaacttgatcaaaaaagatatgctcaacctggctagaaataagagtgagctgatggaattactcctcatgccgatgattttgattcttattctgggctttgccttagggggtatcttgagtggggaccagggccttgagtcttttaaggtaggtttggtcagcgattcttccccaaaagaagatctagaaagcttccagaaagacctcagtcaagctggctaccctgaccaagctcaagaaagtttgctggaagctgccagaaataacgaccctcaagccctcctagccgacgtattatcttcacctgacctagctaacctagtggagatagaagaattttcgaataaggacctagccaaccaggccttagaggaagaagaaattgtctcctacctttacttccctgaaaactttaacctccactacctccggtctatttatctaggggaggatagccaagcaagactagacctccaggctaaaaaccagcaaagtttctattcgaatttatttgctgatctaaccaagcaggtattagatgaatttaaccttcaaatctccttgatgacggccagccaaggtcaaggacaaaccgatcaaaaccgagaccaaattggagccatccaaagcttgtcagttgaagatcccgtcaccgcttttcaatatttcaccttggctatgggggtgatgtttgccttgcttatccccgtcagtgtgtctttaaacagttttgaagaaaaaagaaaccacctttacgaccgcctaaccatagctggcctaccctggttgtcttacctcttcagcaagttttttgcctccttcttcttggcgcttggtcaattggccatcttattcaccttttccaccttgttttttggagtcttttcaggtaaagacctgactttttggttgggcttagctagtttaactttattctttgccctagttgtagcgagtctaggggcccttcttgtctccctaactataagaacaaagaaacggactgtggccaacagttttagtctactcgtttttatctttgccttgctaggcggtagcttcttcccactcgaccaggtgtctgatagcttaatcaagattggagaatggactccaaatggggcagccttgcaagcttacttgcaggccttacagggctttagtctccaagaaatattccctaccatgctaaggttaggcctggttgcagctgggctagtcttattagccctcactatttaccctaaaaggaggatgacctaa

SEQ ID NO: 4042 - protein, 85 aa, Alloiococcus otitidis
MANSFSLLVFIFALLGGSFFPLDQVSDSLIKIGEWTPNGAALQAYLQALQGFSLQEIFPTMLRLGLVAAGLVLLALTIYPKRRMT

SEQ ID NO: 4043 - DNA, 1302 bp, Alloiococcus otitidis; identical to SEQ ID NO: 4041
  CDS (880)..(1299)

SEQ ID NO: 4044 - protein, 140 aa, Alloiococcus otitidis
MAILFTFSTLFFGVFSGKDLTFWLGLASLTLFFALVVASLGALLVSLTIRTKKRTVANSFSLLVFIFALLGGSFFPLDQVSDSLIKIGEWTPNGAALQAYLQALQGFSLQEIFPTMLRLGLVAAGLVLLALTIYPKRRMT

SEQ ID NO: 4045 - DNA, 1302 bp, Alloiococcus otitidis; identical to SEQ ID NO: 4041
  CDS (826)..(1299)

SEQ ID NO: 4046 - protein, 158 aa, Alloiococcus otitidis
MSYLFSKFFASFFLALGQLAILFTFSTLFFGVFSGKDLTFWLGLASLTLFFALVVASLGALLVSLTIRTKKRTVANSFSLLVFIFALLGGSFFPLDQVSDSLIKIGEWTPNGAALQAYLQALQGFSLQEIFPTMLRLGLVAAGLVLLALTIYPKRRMT

SEQ ID NO: 4047 - DNA, 1302 bp, Alloiococcus otitidis; identical to SEQ ID NO: 4041
  CDS (43)..(1299)

SEQ ID NO: 4048 - protein, 419 aa, Alloiococcus otitidis
MIKKDMLNLARNKSELMELLLMPMILILILGFALGGILSGDQGLESFKVGLVSDSSPKEDLESFQKDLSQAGYPDQAQESLLEAARNNDPQALLADVLSSPDLANLVEIEEFSNKDLANQALEEEEIVSYLYFPENFNLHYLRSIYLGEDSQARLDLQAKNQQSFYSNLFADLTKQVLDEFNLQISLMTASQGQGQTDQNRDQIGAIQSLSVEDPVTAFQYFTLAMGVMFALLIPVSVSLNSFEEKRNHLYDRLTIAGLPWLSYLFSKFFASFFLALGQLAILFTFSTLFFGVFSGKDLTFWLGLASLTLFFALVVASLGALLVSLTIRTKKRTVANSFSLLVFIFALLGGSFFPLDQVSDSLIKIGEWTPNGAALQAYLQALQGFSLQEIFPTMLRLGLVAAGLVLLALTIYPKRRMT

SEQ ID NO: 4049 - DNA, 1302 bp, Alloiococcus otitidis; identical to SEQ ID NO: 4041
  CDS (34)..(1299)

SEQ ID NO: 4050 - protein, 422 aa, Alloiococcus otitidis
MFNLIKKDMLNLARNKSELMELLLMPMILILILGFALGGILSGDQGLESFKVGLVSDSSPKEDLESFQKDLSQAGYPDQAQESLLEAARNNDPQALLADVLSSPDLANLVEIEEFSNKDLANQALEEEEIVSYLYFPENFNLHYLRSIYLGEDSQARLDLQAKNQQSFYSNLFADLTKQVLDEFNLQISLMTASQGQGQTDQNRDQIGAIQSLSVEDPVTAFQYFTLAMGVMFALLIPVSVSLNSFEEKRNHLYDRLTIAGLPWLSYLFSKFFASFFLALGQLAILFTFSTLFFGVFSGKDLTFWLGLASLTLFFALVVASLGALLVSLTIRTKKRTVANSFSLLVFIFALLGGSFFPLDQVSDSLIKIGEWTPNGAALQAYLQALQGFSLQEIFPTMLRLGLVAAGLVLLALTIYPKRRMT

SEQ ID NO: 4051 - DNA, 1011 bp, Alloiococcus otitidis
  CDS (79)..(1008)
gtcgtgaccgagggcagtgttttgactgcccttttttggctatactctaactacatcaaaaagagagaagggaagaccatgttagaagctcggcaaatcaataaaagcttcaaaaaattccaagctgtcaaagacctcagccttcatttagaagaaggggagtcagtcggtttattaggtcccaatggggcaggtaagtcaacgactatatctattctgtctaccttgatgcaagctaattcagggagcctcatatacaagggtgaggattgctttaaaaatcctaaacctctacgtcaggcactcggtctcgttccccaagagattgccctttacccagaattgaccgcctatgaaaacttaaagttttttggcaaggtctatcagttaaagggaaaagatttagaagaccggatccaaacaattctggaagaaattggcctaaaagaccggcagaaggagagggtaacaaactattcaggcggaatgaagcggcggttaaatatcggggtagccctgatacaggctcctcagatcttagttatggatgagcctaccgtgggcattgacccccagtcccggagtcatatcctggacatggttaagaagctcaaccagagccaaggaatgaccgtcctctatactagtcactacatggaagaagtcgaaaaactatgcgaccgggtttacattatggaccatggggaaattattgcagcaggaacgatcgatgatttgaaaagtatcctcaataatgaaaagtccatccaagttgacctggtccaaaaatcatcatcttttaaagaaaaactcctcgaccaggccaatatcaaccaagtcttagatactgagaggggttatcaattaattgcctctaatgaaaaagaaaccatgacccaagtctttgagatagcccaccaattaaatctagaaatcaaccggcttagcatccacaatcctagtttagaagatgtctttctacacttgactggccgccgattgcgggattag

SEQ ID NO: 4052 - protein, 310 aa, Alloiococcus otitidis
MLEARQINKSFKKFQAVKDLSLHLEEGESVGLLGPNGAGKSTTISILSTLMQANSGSLIYKGEDCFKNPKPLRQALGLVPQEIALYPELTAYENLKFFGKVYQLKGKDLEDRIQTILEEIGLKDRQKERVTNYSGGMKRRLNIGVALIQAPQILVMDEPTVGIDPQSRSHILDMVKKLNQSQGMTVLYTSHYMEEVEKLCDRVYIMDHGEIIAAGTIDDLKSILNNEKSIQVDLVQKSSSFKEKLLDQANINQVLDTERGYQLIASNEKETMTQVFEIAHQLNLEINRLSIHNPSLEDVFLHLTGRRLRD

SEQ ID NO: 4053 - DNA, 1011 bp, Alloiococcus otitidis; identical to SEQ ID NO: 4051
  CDS (22)..(1008)

SEQ ID NO: 4054 - protein, 329 aa, Alloiococcus otitidis
MTALFWLYSNYIKKREGKTMLEARQINKSFKKFQAVKDLSLHLEEGESVGLLGPNGAGKSTTISILSTLMQANSGSLIYKGEDCFKNPKPLRQALGLVPQEIALYPELTAYENLKFFGKVYQLKGKDLEDRIQTILEEIGLKDRQKERVTNYSGGMKRRLNIGVALIQAPQILVMDEPTVGIDPQSRSHILDMVKKLNQSQGMTVLYTSHYMEEVEKLCDRVYIMDHGEIIAAGTIDDLKSILNNEKSIQVDLVQKSSSFKEKLLDQANINQVLDTERGYQLIASNEKETMTQVFEIAHQLNLEINRLSIHNPSLEDVFLHLTGRRLRD

SEQ ID NO: 4055 - DNA, 1011 bp, Alloiococcus otitidis; identical to SEQ ID NO: 4051
  CDS (4)..(1008)

SEQ ID NO: 4056 - protein, 335 aa, Alloiococcus otitidis
MTEGSVLTALFWLYSNYIKKREGKTMLEARQINKSFKKFQAVKDLSLHLEEGESVGLLGPNGAGKSTTISILSTLMQANSGSLIYKGEDCFKNPKPLRQALGLVPQEIALYPELTAYENLKFFGKVYQLKGKDLEDRIQTILEEIGLKDRQKERVTNYSGGMKRRLNIGVALIQAPQILVMDEPTVGIDPQSRSHILDMVKKLNQSQGMTVLYTSHYMEEVEKLCDRVYIMDHGEIIAAGTIDDLKSILNNEKSIQVDLVQKSSSFKEKLLDQANINQVLDTERGYQLIASNEKETMTQVFEIAHQLNLEINRLSIHNPSLEDVFLHLTGRRLRD

SEQ ID NO: 4057 - DNA, 660 bp, Alloiococcus otitidis
  CDS (13)..(657)
gaggctatattcatgattaagattttactagccgaagaccaagccttggtccgtgaaagcttgaaattaatgatagaaatggacagcgacctcaaagtgaccggactggctcaaaatggccaggaagcacttgaactttgccgagaccaagcctttgacctggccttactcgacatccgaatgccagtcatgaccggcctagaagccgctcggaccatccgaaaaaagtggccagatctgatcatcctaatgcttacgacctttaatgatgaagattatgccttagaagccctgaaatatggggtgaggggttacttactcaaagatggggaggccgaccgtttaacccagtccatcaagagtgcctataagggagggctggtcttagaagatcaggtggcagccaaggtcttaccccagttaatcaaacaggctaggcccagccaggttaaggaccaggttaaaacaggtaacttaactgaaagggaattacaaatcctcacttatcttggtcgaggcttgagtaaccaggagatcagccaggaattatttctatcagttggaacagtgaaaaacttggtgtccactcttttggacaaacttgaattgagagaccgaacccaactggctatctatgctatccacaacaatatcacttaa

SEQ ID NO: 4058 - protein, 215 aa, Alloiococcus otitidis
MIKILLAEDQALVRESLKLMIEMDSDLKVTGLAQNGQEALELCRDQAFDLALLDIRMPVMTGLEAARTIRKKWPDLIILMLTTFNDEDYALEALKYGVRGYLLKDGEADRLTQSIKSAYKGGLVLEDQVAAKVLPQLIKQARPSQVKDQVKTGNLTERELQILTYLGRGLSNQEISQELFLSVGTVKNLVSTLLDKLELRDRTQLAIYAIHNNIT

SEQ ID NO: 4059 - DNA, 1131 bp, Alloiococcus otitidis
  CDS (196)..(1128)
gtaggaggtaaagaaaagatggtaaatttttggcccaactttatcctgatatttttgtcttggttcattactgccatggcctttagctttggccaatttggattagtcttgtctttagcttttttcctaaccttttttcttttaccaatattaagaaagccttttcgatcactggctacctggctcttacccctcatgttagctttgttatcctttgagactaaccagccaagctttatcgtgttgatttttatgtttctttttagctatttagtcaaggacttcaagcacaatcaagtgcttttatttgccctttattcctataccctaaccgctatccgcctagttactagttcccattggcctgccttagccgttgtcagcttatcctggcttttcctaggtctggttgcctggcattacactagcctgaaagacctaaaccaaaagcaggctggccagatcagccaacttgaagatctcttaaccatgcttaaaaaagagtcagtggccatggatgaccatatccggcaagaagaacgaaaccggctagcccgggagatccatgactctgtgggacaccggctcacggccttgttaatgcaattggaagtcgcccgtctaaaagaagacgacccctcaactaggggccaactagcccaattaaaaaaactagctcagacttctttatatgaaacccgcatggccgtccaaaccatgcagaccgaagaagtgtccggcattccagctattatccagctcatccggaagttagaaatagaaagtcaactgaacttgaccatcaagttgggggcaaatgttttaggtctatccctatctaacgaccaggcagtagccatttaccggactgtccaggaagctctgaccaatatgatgcgccattcccaggtcaaaaaagctgaaattaccatcagcctggtcgccagccgggacatccgctttcaggttgaccatcccttacaaaaaccggttaaaattaaggagggctttggcctgaccaatataaggagccgtttgactcaactaaatggccacttaaccctcgaccaatctgaccagaccttttcagtaattggccaaattcctttaggaggctatattcatgattaa

SEQ ID NO: 4060 - protein, 311 aa, Alloiococcus otitidis
MLALLSFETNQPSFIVLIFMFLFSYLVKDFKHNQVLLFALYSYTLTAIRLVTSSHWPALAVVSLSWLFLGLVAWHYTSLKDLNQKQAGQISQLEDLLTMLKKESVAMDDHIRQEERNRLAREIHDSVGHRLTALLMQLEVARLKEDDPSTRGQLAQLKKLAQTSLYETRMAVQTMQTEEVSGIPAIIQLIRKLEIESQLNLTIKLGANVLGLSLSNDQAVAIYRTVQEALTNMMRHSQVKKAEITISLVASRDIRFQVDHPLQKPVKIKEGFGLTNIRSRLTQLNGHLTLDQSDQTFSVIGQIPLGGYIHD

SEQ ID NO: 4061 - DNA, 1131 bp, Alloiococcus otitidis; identical to SEQ ID NO: 4059
  CDS (19)..(1128)

SEQ ID NO: 4062 - protein, 370 aa, Alloiococcus otitidis
MVNFWPNFILIFLSWFITAMAFSFGQFGLVLSLAFFLTFFLLPILRKPFRSLATWLLPLMLALLSFETNQPSFIVLIFMFLFSYLVKDFKHNQVLLFALYSYTLTAIRLVTSSHWPALAVVSLSWLFLGLVAWHYTSLKDLNQKQAGQISQLEDLLTMLKKESVAMDDHIRQEERNRLAREIHDSVGHRLTALLMQLEVARLKEDDPSTRGQLAQLKKLAQTSLYETRMAVQTMQTEEVSGIPAIIQLIRKLEIESQLNLTIKLGANVLGLSLSNDQAVAIYRTVQEALTNMMRHSQVKKAEITISLVASRDIRFQVDHPLQKPVKIKEGFGLTNIRSRLTQLNGHLTLDQSDQTFSVIGQIPLGGYIHD

SEQ ID NO: 4063 - DNA, 465 bp, Alloiococcus otitidis
  CDS (88)..(462)
cggtcctcaatcgattttggtaatcctagtcaacaattcaataatgacctttactcatatagctattggggtgaccgtcttagatcaatgtctagtcggtcatcttttttgataaccagcttgacagaagggaaaaaattagctataattttaaatcgtaatagttacgaattaaatagaggaagggttttccgattggcaaagaaatctaaaattgcaaaattgaaaaaacaagaggcaatggtcgaaaagtaccgcgacctacgccaagaattgaaggacaagcatgactatgaaggcttggccaagttaccccgagatgcttcacctactcgtttgcggaacagggaccggatcgatggacggccccatggttatatgcggaaatttggtctgtcccggctcaacttccgcaagtatgcccaccaagggaagatccctggtgtcaaaaaagcctcttggtaa

SEQ ID NO: 4064 - protein, 125 aa, Alloiococcus otitidis
MSSRSSFLITSLTEGKKLAIILNRNSYELNRGRVFRLAKKSKIAKLKKQEAMVEKYRDLRQELKDKHDYEGLAKLPRDASPTRLRNRDRIDGRPHGYMRKFGLSRLNFRKYAHQGKIPGVKKASW

SEQ ID NO: 4065 - DNA, 681 bp, Alloiococcus otitidis
  CDS (292)..(678)
ggatttcttacaagaagggggcaatgttgccttagtcgatatttcccaagaggccttaaacgaatccagggaagaattaaaagaattcggcaaggtcattaccatagtagcggatgtgacgaaagaagaagacgtgaaacactatgtccaaaaacccttgatgaattttctggtatcgacattttctttaacaatgctggtattgaaggcaaggttgctcctattcatgaacaaagttttgaggactttactaaagtcttggatgtaaatgtaaacggtgtctttttaggtatgaagtatgttgtcccggtcatgctagaagctggtcgaggcagcatcatcaatatggcttccgtggccggcttagacggttccctgggcatgtcaccttataacgcttctaagcatgcggttgttggcttaactaaggcagcagccctggaattagcagccgacaatgtccgggtcaattcggtccatccttcaccggtcaatacccggatgatgagagccgtagaagaagggatggggtccagtcaagaagatatgtccttgtctatcccaataggccgctatgcagaatcctctgacatctccaatttggtcctctttttggcagatgatgccagcgactttattaccggtgtccaatacagggtagacggggggatgggtgtttag

SEQ ID NO: 4066 - protein, 129 aa, Alloiococcus otitidis
MKYVVPVMLEAGRGSIINMASVAGLDGSLGMSPYNASKHAVVGLTKAAALELAADNVRVNSVHPSPVNTRMMRAVEEGMGSSQEDMSLSIPIGRYAESSDISNLVLFLADDASDFITGVQYRVDGGMGV

SEQ ID NO: 4067 - DNA, 681 bp, Alloiococcus otitidis; identical to SEQ ID NO: 4065
  CDS (259)..(678)

SEQ ID NO: 4068 - protein, 140 aa, Alloiococcus otitidis
MDVNVNGVFLGMKYVVPVMLEAGRGSIINMASVAGLDGSLGMSPYNASKHAVVGLTKAAALELAADNVRVNSVHPSPVNTRMMRAVEEGMGSSQEDMSLSIPIGRYAESSDISNLVLFLADDASDFITGVQYRVDGGMGV

SEQ ID NO: 4069 - DNA, 387 bp, Alloiococcus otitidis
  CDS (49)..(384)
aataatagtagtagcagaagtcgacccaaaagacaaggaggaattcccatgtcaaggtttgaaggtaaaaacgttgtcataactggtggatctggtggcatcggtaaggtaactgctaaggatttcttacaagaagggggcaatgttgccttagtcgatatttcccaagaggccttaaacgaatccagggaagaattaaaagaattcggcaaggtcattaccatagtagcggatgtgacgaaagaagaagacgtgaaacactatgtccaaaaacccttgatgaattttctggtatcgacattttctttaacaatgctggtattgaaggcaaggttgctcctattcatgaacaaagttttgaggactttactaaagtcttggatgtaa

SEQ ID NO: 4070 - protein, 112 aa, Alloiococcus otitidis
MSRFEGKNVVITGGSGGIGKVTAKDFLQEGGNVALVDISQEALNESREELKEFGKVITIVADVTKEEDVKHYVQKPLMNFLVSTFSLTMLVLKARLLLFMNKVLRTLLKSWM

SEQ ID NO: 4071 - DNA, 1464 bp, Alloiococcus otitidis
  CDS (1006)..(1461)
ttacaaatgtggtgtgcatttgatacctgcaaagatgggtgtgtgaatgtaaaattagaaaggaataccatgttaccagatatacaagaattagcagatttgatttggcaacccatgattatcttagtgctaggggggagcatcctacttaccctccgcacaagatttttccaaattaggcacctaccttttattttgaaggaaacctttggtcagttattttcaaatgacgacaatggacgggggaccgttacagccttccaggccatgaccacagccctagcttcctccatcggtgctgccaatatcgttgtcgccccaaccgttatcttcctagctggacctggtgccctcttttggatgtgggtttcaggaattttgacttctgcaactaagtttggggaagtagccctagccatcaagtatcgggagaaaaatgaagatggggagtacataggtggtgccagctatgtcttccgcaaggggatccggaataatattgggaaaattttaggctttttagtttcatttatcttgatgattgaaattctaccctctatttccttgcagaccatctcggcagctggtcctgttgagaatgtagcggctgccatcggaattgataatacccttgcccgcaatatcaccattattgcgatctttattttaactgttttggtcgtttacggtggggtcaagtcgattggaagattgtccgaaaaactagttccttacatggccattacttacttggttttgggtgccattatcctagttatgcatatcgaccaaattcctaacgcccttcggatggttgttgttggggccttcaacccgaaagccatttccggcggttttgttggagccaccctccaaaatgtcatccgaaatggggtagctcgtggtgtctactccaacgaagctggactcggaactactggttttggccacgctgcggcgaccactgaccacccagcccgtcaaggggtttggggtgtctttgaagtgattatcgacaccctggttgtttgtaccatgtccggcctaattatcttggttactggggtttggactccgggtatgagtgaacaagctttgaacgagaccatgccggttgcggtagagcgagccattaatgaatccttgggtgtctttggttcagtggttatctccatctgcctcttcctctttgtcgtctctacgatgattgtcatcgtcttctactgcgagaaacaagctgaatacttgtttggtcggactggaggtctcttgctcagagccatcgcctgtgggatgatcttggtctccatgttcatcagttttgaaaatgctggagcctacctagacctggctctagcctttgtggtcctaccgaatatgatcggtattatcatgctcaatggtgaggtcaaggccatcaaggaagacttcttcgataatccgaaatacatgtcaaatgattag

SEQ ID NO: 4072 - protein, 152 aa, Alloiococcus otitidis
MIIDTLVVCTMSGLIILVTGVWTPGMSEQALNETMPVAVERAINESLGVFGSVVISICLFLFVVSTMIVIVFYCEKQAEYLFGRTGGLLLRAIACGMILVSMFISFENAGAYLDLALAFVVLPNMIGIIMLNGEVKAIKEDFFDNPKYMSND

SEQ ID NO: 4073 - DNA, 1464 bp, Alloiococcus otitidis; identical to SEQ ID NO: 4071
  CDS (268)..(1461)

SEQ ID NO: 4074 - protein, 398 aa, Alloiococcus otitidis
MTTALASSIGAANIVVAPTVIFLAGPGALFWMWVSGILTSATKFGEVALAIKYREKNEDGEYIGGASYVFRKGIRNNIGKILGFLVSFILMIEILPSISLQTISAAGPVENVAAAIGIDNTLARNITIIAIFILTVLVVYGGVKSIGRLSEKLVPYMAITYLVLGAIILVMHIDQIPNALRMVVVGAFNPKAISGGFVGATLQNVIRNGVARGVYSNEAGLGTTGFGHAAATTDHPARQGVWGVFEVIIDTLVVCTMSGLIILVTGVWTPGMSEQALNETMPVAVERAINESLGVFGSVVISICLFLFVVSTMIVIVFYCEKQAEYLFGRTGGLLLRAIACGMILVSMFISFENAGAYLDLALAFVVLPNMIGIIMLNGEVKAIKEDFFDNPKYMSND

SEQ ID NO: 4075 - DNA, 1464 bp, Alloiococcus otitidis; identical to SEQ ID NO: 4071
  CDS (7)..(1461)

SEQ ID NO: 4076 - protein, 485 aa, Alloiococcus otitidis
MWCAFDTCKDGCVNVKLERNTMLPDIQELADLIWQPMIILVLGGSILLTLRTRFFQIRHLPFILKETFGQLFSNDDNGRGTVTAFQAMTTALASSIGAANIVVAPTVIFLAGPGALFWMWVSGILTSATKFGEVALAIKYREKNEDGEYIGGASYVFRKGIRNNIGKILGFLVSFILMIEILPSISLQTISAAGPVENVAAAIGIDNTLARNITIIAIFILTVLVVYGGVKSIGRLSEKLVPYMAITYLVLGAIILVMHIDQIPNALRMVVVGAFNPKAISGGFVGATLQNVIRNGVARGVYSNEAGLGTTGFGHAAATTDHPARQGVWGVFEVIIDTLVVCTMSGLIILVTGVWTPGMSEQALNETMPVAVERAINESLGVFGSVVISICLFLFVVSTMIVIVFYCEKQAEYLFGRTGGLLLRAIACGMILVSMFISFENAGAYLDLALAFVVLPNMIGIIMLNGEVKAIKEDFFDNPKYMSND

SEQ ID NO: 4077 - DNA, 264 bp, Alloiococcus otitidis
  CDS (1)..(261)
atggatatagtgaccattcattgccgagacttaatccaagccggccaagaccttaattacctgaaagaccgtttagacttaactaactgttcaggcaacaacctggatgccctgtgggactgcctcagtgaaaaagaagatgactgtctagttatcttaaggcaaagcaggctattaaaagaatcgagtcgaggactaaagctacaaagatttttccagagcctggatcagaatttaacttgttataaaataatatataaataa

SEQ ID NO: 4078 - protein, 87 aa, Alloiococcus otitidis
MDIVTIHCRDLIQAGQDLNYLKDRLDLTNCSGNNLDALWDCLSEKEDDCLVILRQSRLLKESSRGLKLQRFFQSLDQNLTCYKIIYK

SEQ ID NO: 4079 - DNA, 555 bp, Alloiococcus otitidis
  CDS (25)..(552)
aagcatcatagagagaggcaagtcatgaccaaaaaacaaaaacaagtcctgtctgccctagctgccctaatcctgggcttgcttggcctgtttgggatagacctagtcggtgaagaagctagtcagggtagtgaccaagctgcaagccaacaaacttggaaggatgaagaaggtcaggctgaagtaggagcattagacccaaacggccactacactgacaagcaaaatgtggtggactttatcgataactttcagcaattgccagataattacctgaccaaggaagaagcccgtaacttaggttgggtacctagtgaaggcaatttagatgaagtggcccccggcatgtccataggaggcgacgtctttggcaactttgaggggaacttaccggatgagcctggccggcaatattatgaggcagatatcaattatgatggaggctttcgcaatgctgaacgcctagtcttctcagatgacggcttgtatttttacactgacgaccattacgataactttgaagaagtccaacccagccaagctaagggggtttag

SEQ ID NO: 4080 - protein, 176 aa, Alloiococcus otitidis
MTKKQKQVLSALAALILGLLGLFGIDLVGEEASQGSDQAASQQTWKDEEGQAEVGALDPNGHYTDKQNVVDFIDNFQQLPDNYLTKEEARNLGWVPSEGNLDEVAPGMSIGGDVFGNFEGNLPDEPGRQYYEADINYDGGFRNAERLVFSDDGLYFYTDDHYDNFEEVQPSQAKGV

SEQ ID NO: 4081 - DNA, 1788 bp, Alloiococcus otitidis
  CDS (181)..(1785)
caccatgaaaaattgttatactattgtggtaatgttttgcaaaggggattttttatgttgtcaacattggacttaatcaaagtgattaaaccgtatttttcaaaatataaacatatcttagtttatgacttgatatttgcactcttaaccaccctggctggctttatcctgccccttgtcttgcgacaactcaccaattacggagccagtggtagcttaactggtagtataatagccagcctgtccttaatctttatcgttttaaaagtcgttgaagtaattgcccgctactacatgaccaatgttggccaccggatgggtgctttgattgaaaccgatatgcggcgcgacctctttgaccacctcatggccttggacaatgactactacaatgaaaaccgggtaggggagttaatgtccaaagtgaccaatgacctgtttgacattaccgaattcagccaccacgcccccgaagaatacctgatttttgcggtccaaaccgtggtttcctttattattttaggcattatcaacctacctttgaccttggtgatctttatcatgctgcccttgatgtttgtcgtctcccgtaagttccggcaaaaaatgggtcatgagcagatgaaccaacgccggcagattgggaaattaaattctgggattgaagattccttgtctggtatcaatgtggtcaaaagttttgccaatgaagatcaggaaattaataagtttaaaacaggtaatgaggacttttactacattaagaaaaaatactatatctccatggccggttttatgaccgttacttccgcctttgaaggggttatgtatattatcgtcttggtcatgggaggtgtcttgatcttaaatgggtccatgctggcttctgacatgattgtctttattatgtacatcaatatgctgattaccagtttgaagcggatcatccagtttaccgaaaacttccaaaaggggttaaccggtatccaacgcttccatgaagtgatgactgctaaaccacgggttatcgattcctcccatccgattgaattggaagatgtggctggaagaattgaagcccgccacctagtttttgactaccacaatggggagagggtcttggatgacatcaactttaccattgaacccggccagcaagtggcctttgtaggaccatccggggcaggcaagtccactttaatcaacctaatcccccgtttttatgatttaacgtcaggagaaatcctcgttgacggccacaatatccaagacatcagcctcttttctttaagagaccatatcgggattgtccaacaagatgtctacctcttcgctggaaccatagcggataatatccggtatgggaagttggatgctagcgatgcggaaatccgccaggctgccgaccttgctggggctactggctttatccgtgaactaccagaaggcttcaacaccaatattggggaaagaggggcccggctatcaggcggacaaaaacaaagaatttccattgcccgggtcttcttaaaaaacccacctatcttaatcctagatgaagcgacttctgccttagacaaccaaagtgagttagttgtgcaagaatccttggataaattagcccaaggacggaccaccatcactattgcccaccgcttgacaacggttgaggattcagacctaatctacgttttaaccgacgatggcattatcgaacaaggtagccaccaagacctgatggatcaaaaaggttactactatagactttactccagaagtttagactag

SEQ ID NO: 4082 - protein, 535 aa, Alloiococcus otitidis
MRQLTNYGASGSLTGSIIASLSLIFIVLKVVEVIARYYMTNVGHRMGALIETDMRRDLFDHLMALDNDYYNENRVGELMSKVTNDLFDITEFSHHAPEEYLIFAVQTVVSFIILGIINLPLTLVIFIMLPLMFVVSRKFRQKMGHEQMNQRRQIGKLNSGIEDSLSGINVVKSFANEDQEINKFKTGNEDFYYIKKKYYISMAGFMTVTSAFEGVMYIIVLVMGGVLILNGSMLASDMIVFIMYINMLITSLKRIIQFTENFQKGLTGIQRFHEVMTAKPRVIDSSHPIELEDVAGRIEARHLVFDYHNGERVLDDINFTIEPGQQVAFVGPSGAGKSTLINLIPRFYDLTSGEILVDGHNIQDISLFSLRDHIGIVQQDVYLFAGTIADNIRYGKLDASDAEIRQAADLAGATGFIRELPEGFNTNIGERGARLSGGQKQRISIARVFLKNPPILILDEATSALDNQSELVVQESLDKLAQGRTTITIAHRLTTVEDSDLIYVLTDDGIIEQGSHQDLMDQKGYYYRLYSRSLD

SEQ ID NO: 4083 - DNA, 1788 bp, Alloiococcus otitidis; identical to SEQ ID NO: 4081
  CDS (67)..(1785)

SEQ ID NO: 4084 - protein, 573 aa, Alloiococcus otitidis
MDLIKVIKPYFSKYKHILVYDLIFALLTTLAGFILPLVLRQLTNYGASGSLTGSIIASLSLIFIVLKVVEVIARYYMTNVGHRMGALIETDMRRDLFDHLMALDNDYYNENRVGELMSKVTNDLFDITEFSHHAPEEYLIFAVQTVVSFIILGIINLPLTLVIFIMLPLMFVVSRKFRQKMGHEQMNQRRQIGKLNSGIEDSLSGINVVKSFANEDQEINKFKTGNEDFYYIKKKYYISMAGFMTVTSAFEGVMYIIVLVMGGVLILNGSMLASDMIVFIMYINMLITSLKRIIQFTENFQKGLTGIQRFHEVMTAKPRVIDSSHPIELEDVAGRIEARHLVFDYHNGERVLDDINFTIEPGQQVAFVGPSGAGKSTLINLIPRFYDLTSGEILVDGHNIQDISLFSLRDHIGIVQQDVYLFAGTIADNIRYGKLDASDAEIRQAADLAGATGFIRELPEGFNTNIGERGARLSGGQKQRISIARVFLKNPPILILDEATSALDNQSELVVQESLDKLAQGRTTITIAHRLTTVEDSDLIYVLTDDGIIEQGSHQDLMDQKGYYYRLYSRSLD

SEQ ID NO: 4085 - DNA, 1788 bp, Alloiococcus otitidis; identical to SEQ ID NO: 4081
  CDS (55)..(1785)

SEQ ID NO: 4086 - protein, 577 aa, Alloiococcus otitidis
MLSTLDLIKVIKPYFSKYKHILVYDLIFALLTTLAGFILPLVLRQLTNYGASGSLTGSIIASLSLIFIVLKVVEVIARYYMTNVGHRMGALIETDMRRDLFDHLMALDNDYYNENRVGELMSKVTNDLFDITEFSHHAPEEYLIFAVQTVVSFIILGIINLPLTLVIFIMLPLMFVVSRKFRQKMGHEQMNQRRQIGKLNSGIEDSLSGINVVKSFANEDQEINKFKTGNEDFYYIKKKYYISMAGFMTVTSAFEGVMYIIVLVMGGVLILNGSMLASDMIVFIMYINMLITSLKRIIQFTENFQKGLTGIQRFHEVMTAKPRVIDSSHPIELEDVAGRIEARHLVFDYHNGERVLDDINFTIEPGQQVAFVGPSGAGKSTLINLIPRFYDLTSGEILVDGHNIQDISLFSLRDHIGIVQQDVYLFAGTIADNIRYGKLDASDAEIRQAADLAGATGFIRELPEGFNTNIGERGARLSGGQKQRISIARVFLKNPPILILDEATSALDNQSELVVQESLDKLAQGRTTITIAHRLTTVEDSDLIYVLTDDGIIEQGSHQDLMDQKGYYYRLYSRSLD

SEQ ID NO: 4087 - DNA, 1788 bp, Alloiococcus otitidis; identical to SEQ ID NO: 4081
  CDS (13)..(1785)

SEQ ID NO: 4088 - protein, 591 aa, Alloiococcus otitidis
MLYYCGNVLQRGFFMLSTLDLIKVIKPYFSKYKHILVYDLIFALLTTLAGFILPLVLRQLTNYGASGSLTGSIIASLSLIFIVLKVVEVIARYYMTNVGHRMGALIETDMRRDLFDHLMALDNDYYNENRVGELMSKVTNDLFDITEFSHHAPEEYLIFAVQTVVSFIILGIINLPLTLVIFIMLPLMFVVSRKFRQKMGHEQMNQRRQIGKLNSGIEDSLSGINVVKSFANEDQEINKFKTGNEDFYYIKKKYYISMAGFMTVTSAFEGVMYIIVLVMGGVLILNGSMLASDMIVFIMYINMLITSLKRIIQFTENFQKGLTGIQRFHEVMTAKPRVIDSSHPIELEDVAGRIEARHLVFDYHNGERVLDDINFTIEPGQQVAFVGPSGAGKSTLINLIPRFYDLTSGEILVDGHNIQDISLFSLRDHIGIVQQDVYLFAGTIADNIRYGKLDASDAEIRQAADLAGATGFIRELPEGFNTNIGERGARLSGGQKQRISIARVFLKNPPILILDEATSALDNQSELVVQESLDKLAQGRTTITIAHRLTTVEDSDLIYVLTDDGIIEQGSHQDLMDQKGYYYRLYSRSLD

SEQ ID NO: 4089 - DNA, 846 bp, Alloiococcus otitidis
  CDS (1)..(843)
atgaaaacggctttagtaatggaaggtgggggcatgcgtggcttgtacacagctgccattttagattattttattgggacgggtattgagtttgatgccttatttacggtatcggctagtgccttatttgggattaacttactgtccaaagaccaataccggaccatccgatacaacttaaattacgttaatgacaaacgttttgttagtttaaaaaacttgatcaagacagggaatatggtggacgaaaactatgcctttcatgttttgcccttagaattagacccctttgacaatgaaaaattcaagcaagctgagtcagatttttatgtcacagtcaccaacctagaaacaggcttagctgaacacttcaaggtccaggatgcccaccaagatgtggaagttttccgggcctcttcttccttgcccttcgtttcccaaccggtggaaatcgacggtcagcattatttagatgggggagtggcggactccattccttaccaaaaggcaatggacttgggttatgacaaaattgtgattgtcttgacccaacccttagactaccgcaagtctaagaccaaccccttactaattgacttggcttaccgcaattatcctgaatttgccgaccgcttaaaaaaccgttacttggaatacaaccagactctggatgaggtcaaggctttagaggaccaaggggaggtctttgttatcagaccttctagggacttaaatatctcccggatggaaaaagacccccaacgatatatttatgcttataaaaccggcctcaaagatatccaggccaactatcccgatatgattgactacctgaaaaaagattaa

SEQ ID NO: 4090 - protein, 281 aa, Alloiococcus otitidis
MKTALVMEGGGMRGLYTAAILDYFIGTGIEFDALFTVSASALFGINLLSKDQYRTIRYNLNYVNDKRFVSLKNLIKTGNMVDENYAFHVLPLELDPFDNEKFKQAESDFYVTVTNLETGLAEHFKVQDAHQDVEVFRASSSLPFVSQPVEIDGQHYLDGGVADSIPYQKAMDLGYDKIVIVLTQPLDYRKSKTNPLLIDLAYRNYPEFADRLKNRYLEYNQTLDEVKALEDQGEVFVIRPSRDLNISRMEKDPQRYIYAYKTGLKDIQANYPDMIDYLKKD

SEQ ID NO: 4091 - DNA, 795 bp, Alloiococcus otitidis
  CDS (127)..(792)
tcgaaagctgtatcgaaaaagttcggcaagaccacccccatagtaggggcagtgaccggcgttttggccaatgattttgtggctagaagtcaaaatgcaattggtgctggctcggcaatcgtgaatatgcctgacgaggcagaggctatgatcgacaagacggatgctttttatattaacgttgggaccatcctgccgatatttgaagataccatcccccaagctggtcgcatactagccaaaagtggcaaaacctggctcctggaccctgttggtattggattagggtctttaagaacgcgactattgcgacaatttaaaggctaccagcctaccatcatcaagggtagaccagctgaaattctttccttggctaacttatggtcctttgacggtggccggcctagtgacagtttaagtccccagccccctgctgaagaagccttagcagcaggagtggccattgctgaccatacgggaggggtggtggtcatcattggcgaaaaaaccctcatagcaagccccgaccaagtttactgtgtagaacgcaaggcccattacctggataaattaaccggtatccactccattttagggggcctcatctcagcctatgccggggtagaagaccccctcccagctgccttggtagcttgcttggtcttggaagaagccggcaaccaggctgagcaagtgtctgacggtattgggaccttcgaactcaaattaattgatgccctagaaaaaattgaccccaaagcggttagccaatacccattcaccctaaaagattaa

SEQ ID NO: 4092 - protein, 222 aa, Alloiococcus otitidis
MPDEAEAMIDKTDAFYINVGTILPIFEDTIPQAGRILAKSGKTWLLDPVGIGLGSLRTRLLRQFKGYQPTIIKGRPAEILSLANLWSFDGGRPSDSLSPQPPAEEALAAGVAIADHTGGVVVIIGEKTLIASPDQVYCVERKAHYLDKLTGIHSILGGLISAYAGVEDPLPAALVACLVLEEAGNQAEQVSDGIGTFELKLIDALEKIDPKAVSQYPFTLKD

SEQ ID NO: 4093 - DNA, 795 bp, Alloiococcus otitidis; identical to SEQ ID NO: 4091
  CDS (64)..(792)

SEQ ID NO: 4094 - protein, 243 aa, Alloiococcus otitidis
MANDFVARSQNAIGAGSAIVNMPDEAEAMIDKTDAFYINVGTILPIFEDTIPQAGRILAKSGKTWLLDPVGIGLGSLRTRLLRQFKGYQPTIIKGRPAEILSLANLWSFDGGRPSDSLSPQPPAEEALAAGVAIADHTGGVVVIIGEKTLIASPDQVYCVERKAHYLDKLTGIHSILGGLISAYAGVEDPLPAALVACLVLEEAGNQAEQVSDGIGTFELKLIDALEKIDPKAVSQYPFTLKD

SEQ ID NO: 4095 - DNA, 795 bp, Alloiococcus otitidis; identical to SEQ ID NO: 4091
  CDS (52)..(792)

SEQ ID NO: 4096 - protein, 247 aa, Alloiococcus otitidis
MTGVLANDFVARSQNAIGAGSAIVNMPDEAEAMIDKTDAFYINVGTILPIFEDTIPQAGRILAKSGKTWLLDPVGIGLGSLRTRLLRQFKGYQPTIIKGRPAEILSLANLWSFDGGRPSDSLSPQPPAEEALAAGVAIADHTGGVVVIIGEKTLIASPDQVYCVERKAHYLDKLTGIHSILGGLISAYAGVEDPLPAALVACLVLEEAGNQAEQVSDGIGTFELKLIDALEKIDPKAVSQYPFTLKD

SEQ ID NO: 4097 - DNA, 486 bp, Alloiococcus otitidis
  CDS (46)..(483)
gctttctatggtatattaagcaaaagcaaggaaagttgggttaagatgtcaaatacttactatactatttactggattaacaagcgtgatgatgtcagaaaagagcatgggacctacaagagtgaagacgaggccaaggaagccatcttgacttggtgggaaattaaccaggaagattatgactatgaaatctaccgtaccaatactggggccctagaagttaaatacattgatgactattccttctaccggattgaagcggtacaaagtgaccaaaaactgccttccaaatcttacaaactctacaagcatgaccaaatcctagccaaacgaaaggcccttgacttagatgacaaccaatacctctttgaccaattagctgaaccttaccgggaccggctaatcatggctatggccagtcccaaagtcgcccggagtttggtttacaaccaagaaggtcaacccctcttccaaattgatgactaa

SEQ ID NO: 4098 - protein, 146 aa, Alloiococcus otitidis
MSNTYYTIYWINKRDDVRKEHGTYKSEDEAKEAILTWWEINQEDYDYEIYRTNTGALEVKYIDDYSFYRIEAVQSDQKLPSKSYKLYKHDQILAKRKALDLDDNQYLFDQLAEPYRDRLIMAMASPKVARSLVYNQEGQPLFQIDD

SEQ ID NO: 4099 - DNA, 822 bp, Alloiococcus otitidis
  CDS (13)..(819)
aggagggagacaatgactgagcgattactccacttatccaatattaaaaagtcctttaatcctgatacccttgatgaaaagcaagtcctaaaaggcttaaacttaaccattcacaagggggatttcatcagtgtcattgggggcaatggggcaggcaagtctaccttactcaatattatttctggagctatcaagcctgattcaggcaagatccaaatggagggaaaagatatcactcggacgggggaggttaaccgggctaaagacattgcccgagtctttcaaaacccaagtttggggaccgccccaaggatgactatcgctgaaaatttggctattgccatgaagagaggggaaagacggcttttcggccggtccttaaccaatacaaacaaggcctactttaaaaaactcttagccagtctggaccttggcttagaagaccggctgggtgacagcttagacctgctgtcaggcggtcaacgtcagtccatctctcttttgatggctaccatcaaaaaacccaagctcctcctcttagatgagcatacgtctgcattagaccctaaggctgctgataaggtgatgaccctaacagaccaagctattaaagaagaccaaatcaccagccttatgatcacccacaatatgaaacaagcgattgactacggcaaccggctcattatgctccaccaaggacaaattatcctggacattcaaggacaagccaaggatgagctcacagttgacatggttttggacctcttccaaaaccagactctggaccaagaagtgaccgattcccttttcttgtcagattaa

SEQ ID NO: 4100 - protein, 269 aa, Alloiococcus otitidis
MTERLLHLSNIKKSFNPDTLDEKQVLKGLNLTIHKGDFISVIGGNGAGKSTLLNIISGAIKPDSGKIQMEGKDITRTGEVNRAKDIARVFQNPSLGTAPRMTIAENLAIAMKRGERRLFGRSLTNTNKAYFKKLLASLDLGLEDRLGDSLDLLSGGQRQSISLLMATIKKPKLLLLDEHTSALDPKAADKVMTLTDQAIKEDQITSLMITHNMKQAIDYGNRLIMLHQGQIILDIQGQAKDELTVDMVLDLFQNQTLDQEVTDSLFLSD

SEQ ID NO: 4101 - DNA, 942 bp, Alloiococcus otitidis
  CDS (547)..(939)
aatcctagaagaagcagacagcctaatagagggaggtcaagaatgaacttaatcgttgtttccatagcggaagggttattatgggccgtcatggctatcgggattttcctttcttttcgtatcctacaaatagccgacttaaccattgaaggatcctttcccttaggggcagctgtttctgctgccatgattgcaggcgggtttaacccactcctagctacccttatgggatttgtagctggtatgctggccggtttggtgactggtcttttaattaataagttaaacattccaacccttttagccggtatcttgaccatgacgggcctttactccataaacttacggattatgggccaggccaatatcagtttactcaaccaagaccggtttacccaaatcttagacaaggtctttaagcttcctagccaaaccaacctaatcctcctagccagtttgattttgactgtcattgttgctggcttacacctcttctttaaaactgacttaggccaagccctagttgccactggggacaatgagcggatggcggcttccatgggggtcaaggtccagcaaatgaaaattttagcccttatgttgtctaatggctttgtggccttgtctgggtccttaattgcccaaaataacggttacgctgatatcagcatggggattgggaccattgtcattggactggcctccttgatgctggctgaagtgatttatgccaatgtctcgctaggggtccggctcacttccttggccgtggggtcgattatctaccggctcctcatttccctggccctatccttggggctccagcccaacgacttaaaactggtctcggcaatcttattggcacttgtcatcgccttgccgcattttttcaagcattaccaatccaatttaaaagccatgaaggagggagacaatgactga

SEQ ID NO: 4102 - protein, 131 aa, Alloiococcus otitidis
MAASMGVKVQQMKILALMLSNGFVALSGSLIAQNNGYADISMGIGTIVIGLASLMLAEVIYANVSLGVRLTSLAVGSIIYRLLISLALSLGLQPNDLKLVSAILLALVIALPHFFKHYQSNLKAMKEGDND

SEQ ID NO: 4103 - DNA, 942 bp, Alloiococcus otitidis; identical to SEQ ID NO: 4101
  CDS (187)..(939)

SEQ ID NO: 4104 - protein, 251 aa, Alloiococcus otitidis
MIAGGFNPLLATLMGFVAGMLAGLVTGLLINKLNIPTLLAGILTMTGLYSINLRIMGQANISLLNQDRFTQILDKVFKLPSQTNLILLASLILTVIVAGLHLFFKTDLGQALVATGDNERMAASMGVKVQQMKILALMLSNGFVALSGSLIAQNNGYADISMGIGTIVIGLASLMLAEVIYANVSLGVRLTSLAVGSIIYRLLISLALSLGLQPNDLKLVSAILLALVIALPHFFKHYQSNLKAMKEGDND

SEQ ID NO: 4105 - DNA, 942 bp, Alloiococcus otitidis; identical to SEQ ID NO: 4101
  CDS (43)..(939)

SEQ ID NO: 4106 - protein, 299 aa, Alloiococcus otitidis
MNLIVVSIAEGLLWAVMAIGIFLSFRILQIADLTIEGSFPLGAAVSAAMIAGGFNPLLATLMGFVAGMLAGLVTGLLINKLNIPTLLAGILTMTGLYSINLRIMGQANISLLNQDRFTQILDKVFKLPSQTNLILLASLILTVIVAGLHLFFKTDLGQALVATGDNERMAASMGVKVQQMKILALMLSNGFVALSGSLIAQNNGYADISMGIGTIVIGLASLMLAEVIYANVSLGVRLTSLAVGSIIYRLLISLALSLGLQPNDLKLVSAILLALVIALPHFFKHYQSNLKAMKEGDND

SEQ ID NO: 4107 - DNA, 1008 bp, Alloiococcus otitidis
  CDS (265)..(1005)
ttaggagggaaaagattgaaaaaattacttgccaccattgcggtcctcattgccattgtttcctattacacggtttcctaccaggatccagaacaaggtcaggctagcctagaccaagaagtgagtgttggcatcctacaattggtcagccacccatccctggatgaaatccaacaaggcatccaagatagctttgaagaagatggcagccaagtcgaaattgacctgcaaaatgcccagggggaccaaaacaaccttaataccatgtcccaacgatttgtttaccaagaggcagatctgatgattggaattgccaccccagctgtccaggccttggctaatgcaagctcagatattcccattatcatggctggtgtcaccgatccaatcgaagctggcttaatgaaagacttaaatcaaccgggtagaaatattagtggggtgagagacctaaccccctaccaggaccaaatcgaccttatccaaaccatcctaccagacttgtcaagcttggggattatttactccagtggtgaggttaattcagccaagcaaagtcaagccgcaaaagactatgcccagtcccttggtatggaggtcaaggaagcgactatttcttcgccaaatgacctcatccaagtagctgcccaattatgccaggaagtggaggctatctgggtgggaacggacaataatattgcttctgcctttcccagcctggtcgaagtggctaacgacaaccaggtccccatcttcccagcagtttatgaaatggtggcaagtgggggactagcaacccagggactgagccagtatcaaatcggacggttgagcgggcaaatggccttggaagttttagctggagcagacattgctaatcttcctgtccaagatcctacagagacagaactcgtggttaaccttgaccaggccgatcgcttaggcttgaccatcccgtctgaaatcctagaagaagcagacagcctaatagagggaggtcaagaatga

SEQ ID NO: 4108 - protein, 247 aa, Alloiococcus otitidis
MSQRFVYQEADLMIGIATPAVQALANASSDIPIIMAGVTDPIEAGLMKDLNQPGRNISGVRDLTPYQDQIDLIQTILPDLSSLGIIYSSGEVNSAKQSQAAKDYAQSLGMEVKEATISSPNDLIQVAAQLCQEVEAIWVGTDNNIASAFPSLVEVANDNQVPIFPAVYEMVASGGLATQGLSQYQIGRLSGQMALEVLAGADIANLPVQDPTETELVVNLDQADRLGLTIPSEILEEADSLIEGGQE

SEQ ID NO: 4109 - DNA, 1008 bp, Alloiococcus otitidis; identical to SEQ ID NO: 4107
  CDS (121)..(1005)

SEQ ID NO: 4110 - protein, 295 aa, Alloiococcus otitidis
MSVGILQLVSHPSLDEIQQGIQDSFEEDGSQVEIDLQNAQGDQNNLNTMSQRFVYQEADLMIGIATPAVQALANASSDIPIIMAGVTDPIEAGLMKDLNQPGRNISGVRDLTPYQDQIDLIQTILPDLSSLGIIYSSGEVNSAKQSQAAKDYAQSLGMEVKEATISSPNDLIQVAAQLCQEVEAIWVGTDNNIASAFPSLVEVANDNQVPIFPAVYEMVASGGLATQGLSQYQIGRLSGQMALEVLAGADIANLPVQDPTETELVVNLDQADRLGLTIPSEILEEADSLIEGGQE

SEQ ID NO: 4111 - DNA, 1008 bp, Alloiococcus otitidis; identical to SEQ ID NO: 4107
  CDS (16)..(1005)

SEQ ID NO: 4112 - protein, 330 aa, Alloiococcus otitidis
MKKLLATIAVLIAIVSYYTVSYQDPEQGQASLDQEVSVGILQLVSHPSLDEIQQGIQDSFEEDGSQVEIDLQNAQGDQNNLNTMSQRFVYQEADLMIGIATPAVQALANASSDIPIIMAGVTDPIEAGLMKDLNQPGRNISGVRDLTPYQDQIDLIQTILPDLSSLGIIYSSGEVNSAKQSQAAKDYAQSLGMEVKEATISSPNDLIQVAAQLCQEVEAIWVGTDNNIASAFPSLVEVANDNQVPIFPAVYEMVASGGLATQGLSQYQIGRLSGQMALEVLAGADIANLPVQDPTETELVVNLDQADRLGLTIPSEILEEADSLIEGGQE

SEQ ID NO: 4113 - DNA, 375 bp, Alloiococcus otitidis
  CDS (10)..(372)
aggcccgtcatggtcaagataccggctaaaagggttggaatgtttaacttattaattaaaagaccagtcaccaaaccggccagcataccagctacaaatcccataagggtagctaggagtgggttaaacccgcctgcaatcatggcagcagaaacagctgcccctaagggaaaggatccttcaatggttaagtcggctatttgtaggatacgaaaagaaaggaaaatcccgatagccatgacggcccataataacccttccgctatggaaacaacgattaagttcattcttgacctccctctattaggctgtctgcttcttctaggatttcagacgggatggtcaagcctaagcgatcggcctggtcaaggttaa

SEQ ID NO: 4114 - protein, 121 aa, Alloiococcus otitidis
MVKIPAKRVGMFNLLIKRPVTKPASIPATNPIRVARSGLNPPAIMAAETAAPKGKDPSMVKSAICRIRKERKIPIAMTAHNNPSAMETTIKFILDLPLLGCLLLLGFQTGWSSLSDRPGQG

SEQ ID NO: 4115 - DNA, 1308 bp, Alloiococcus otitidis
  CDS (46)..(1305)
actttaggtgaaatgacagaaatgtatcgtaagtctccaaacttaatggagcaagttgttgacagaagaaacttggaaacagcagccaaagccgttaaacggaacaaaggcgctgcaggtattgacggtatgaccgtttttgagatagaggagcacattcaagcgtattatcaacccttacggaagaaattacttgatggaacgtataagcctcaaccagttaaacgagtagaaataccaaagccgaatggagaaaaacgaaagttaggtataccttgtgtgcgggatagagttgttcaacaagccatacggcaagtaattgaaccgattatagacccgcacttctatgacaacagtcacggattccgaccagggaaaagcacgcacagtgctctcaaacaatgtgcacagtattataaagaaggctatcgtgttgtagttgattgtgacctcaaacaatgctttgacacgctcaatcacgacaaacttatctattatcttgaacagtacatccaagataaaatgatactgaaaattatccgtaagtttttgagagcgggtgtaattgatttgactagcgaatttatcgcaagtgaaacaggggcaccacaaggtggtgttctatcaccgcttttgagtaatgtgtacttacatgaactggataaagagttggttaaccgtggtcatcgatttgtccgatacgcagatgactttgtcatctacgttaaatcaaaacgagccggtgaacgggtaatgaacagcatcacacgctttattgaaaaagacttaaagttaatcgtcaatcaagacaaaagccaggttgggtctcctacccgtttaaagtttttgagctgtctgatgaagcaagtgaatggggattatcgttttatccccaccaaagaagccaagcagaaattcaaacgcagattgagaaagctgaccagtcgtaaacggccaggtacttttaaaaagataatgactgaaattaatcgagtcacccgcggttggattaattactttggtttaggcttcattaaaagctttatcaaagaagttgagcaatggttaaatcaccgtatcagacagctgattcttaaacggtggaaacgtccacgaactattataccaaagttggaacaatatggactggacttagattcagccaaacggattgcgtattcacgcaaaaagtactggcgactgtcatgcacacatgaatttcatcgtgcaataacaacagaaagactcagcaagtggggcttagttccactaagcactatcgctgagtctgcttacgcaagatattga

SEQ ID NO: 4116 - protein, 420 aa, Alloiococcus otitidis; identical to SEQ ID NO: 312

SEQ ID NO: 4117 - DNA, 1308 bp, Alloiococcus otitidis; identical to SEQ ID NO: 4115
  CDS (13)..(1305)

SEQ ID NO: 4118 - protein, 431 aa, Alloiococcus otitidis; identical to SEQ ID NO: 314

SEQ ID NO: 4119 - DNA, 582 bp, Alloiococcus otitidis
  CDS (28)..(579)
caaaaatatataataggagtgtttagattggcacaagattacgatgaaaagcagttgttagaccaggtagagaaagtaacctatgacttgcttgaagaagcaaaactggaagctggccaggccctcgttttaggcttgagtaccagtgaagttgtcggtgggcaaattgggaaaaattccaatgctgaaatcggtaaggcaattgtctccaaaatcaaatccatcttagaagataaggggatttacctggctacccagggttgtgagcacattaaccgggccttagtggtggaccgggaatacgctaaaagccacaatttagaaattgttaatgtcaaaccagcccttcatgcgggtggatcaggcacggttgccgcctatgacctcttagacgacccggttatggtggaacacatcacagctgatgctggtttggacattggggacacctttattgggatgcaggtgaaatttgtccaggttcctgttcgttttgatattgaccaaattggacaagcccatttaactgcccttcggtctcgacctaaaaacatcggtggcgaacgggctgagtatgaataa

SEQ ID NO: 4120 - protein, 184 aa, Alloiococcus otitidis
MAQDYDEKQLLDQVEKVTYDLLEEAKLEAGQALVLGLSTSEVVGGQIGKNSNAEIGKAIVSKIKSILEDKGIYLATQGCEHINRALVVDREYAKSHNLEIVNVKPALHAGGSGTVAAYDLLDDPVMVEHITADAGLDIGDTFIGMQVKFVQVPVRFDIDQIGQAHLTALRSRPKNIGGERAEYE

SEQ ID NO: 4121 - DNA, 582 bp, Alloiococcus otitidis; identical to SEQ ID NO: 4119
  CDS (19)..(579)

SEQ ID NO: 4122 - protein, 187 aa, Alloiococcus otitidis
MFRLAQDYDEKQLLDQVEKVTYDLLEEAKLEAGQALVLGLSTSEVVGGQIGKNSNAEIGKAIVSKIKSILEDKGIYLATQGCEHINRALVVDREYAKSHNLEIVNVKPALHAGGSGTVAAYDLLDDPVMVEHITADAGLDIGDTFIGMQVKFVQVPVRFDIDQIGQAHLTALRSRPKNIGGERAEYE

SEQ ID NO: 4123 - DNA, 531 bp, Alloiococcus otitidis
  CDS (40)..(528)
gttatactgaatgtatacatagacttttggaggaatattatgagtttgattaccgaaaaattcaagcaacttgccgatgatcagaatgtgaagtttaaagaccgggttgttgaacaaccgattaaaaacaaagatggggaagaagtgacccaaaagcaacacgccttccaaaccggcctacaagttaacaaagacaaggttgttccctgctctgttattattcaagaatcacctagcgaccgggttaactaccaaattacctacaatagaattggttacgttactgaccgcaacaagatagggtctgtccttgaagaattaaatgaactcaaccgggtgcgaagtggctactaccactttgccatttccaaagatggcgaattaattatgcggaacttaggtattacaggtgaagacgttagaccccttatcaatacttttgtcttcggtgcccgcatcttgcgcgccctttatcaagaactagaccaaatttctggcttagacctaagccaatccaaccaagctaactaa

SEQ ID NO: 4124 - protein, 163 aa, Alloiococcus otitidis
MSLITEKFKQLADDQNVKFKDRVVEQPIKNKDGEEVTQKQHAFQTGLQVNKDKVVPCSVIIQESPSDRVNYQITYNRIGYVTDRNKIGSVLEELNELNRVRSGYYHFAISKDGELIMRNLGITGEDVRPLINTFVFGARILRALYQELDQISGLDLSQSNQAN

SEQ ID NO: 4125 - DNA, 417 bp, Alloiococcus otitidis
  CDS (10)..(414)
caccatatcatgcagtcatccgctaggaccaagcacccaagatggttgcgcgagaggagtagaaaaatgaacccattgatcgaagaaattaccaaagagcagttacgagatgatattccagactttagacctggtgatactgtccgcgttcacgcccgcattgtcgaagggagccgtgaacgtatccaattgttcgaaggcgttgttatcagtcgccgaggacaaggaatcagtgaaatgtacactgttcgtaaaatttctagcggagttggggtagaacggactttcccagttcactccccacgtgttgctaagatcgaagttacccgccgtggtcgcgttcgtagagctaaattattctacttacgcaaacggactggtaaggcaacccgaatccgtgaacaaatgcgccgttaa

SEQ ID NO: 4126 - protein, 135 aa, Alloiococcus otitidis
MQSSARTKHPRWLRERSRKMNPLIEEITKEQLRDDIPDFRPGDTVRVHARIVEGSRERIQLFEGVVISRRGQGISEMYTVRKISSGVGVERTFPVHSPRVAKIEVTRRGRVRRAKLFYLRKRTGKATRIREQMRR

SEQ ID NO: 4127 - DNA, 996 bp, Alloiococcus otitidis
  CDS (82)..(993)
tatagccctaacaactggggttattttgatgcttgtagcagtcctttacgacgaatacatgatgaaaggaggggaggaaggatgactgaaagaagagaagtccggatagaccaagaaaaggggcgtctggacaaggtcttaagtgatcaactcaatgatttatcccggtctaaaattcaagacttgattcaaacagaccaggtgaccgtcaatggccaggctgtaaaagccaactaccaagtcgccaaaggggacaaggtagtccttaccatcccgccagttcaagaagttaacttagaagctgaagctattccagtccctattgtctaccaagactcagacctagctgtggtgaataaaccccaaaacatggtcgtccaccccagcctaggtcacccagaccataccttggtcaatgcccttttataccaactggacaacttgtctggtatcaacggagaattgcggccaggtattgtccaccggatagacaaggacacatcgggtcttttggtcgtagctaaaaatgacctggcccaccagtccttatccaagcagttaaaagacaagacggttgaccgtcactacctagccttggttcatggccacgtccctcatccaaaagggactatcgatgctccaatcggacgcgactcaaaagaccggaagaaatatgccgtcactgagaatgggaaagaggccatcacccattttgaccttatccgctactttggccaagactatagtctcatccagtgccaactggagaccggccggacccaccaaatcagggtccacctagcctatattggctttcctttagccggagaccccctatacggtccgaagaagacccttgagggaccaggccaatacttacacgctaagactttaggctttgaccatcccagaactggccagcgcctatcctttactagcgacttgccgcaagtttttcagcaaaccttaaaagaattagacttaaaatacaaataa

SEQ ID NO: 4128 - protein, 304 aa, Alloiococcus otitidis
MTERREVRIDQEKGRLDKVLSDQLNDLSRSKIQDLIQTDQVTVNGQAVKANYQVAKGDKVVLTIPPVQEVNLEAEAIPVPIVYQDSDLAVVNKPQNMVVHPSLGHPDHTLVNALLYQLDNLSGINGELRPGIVHRIDKDTSGLLVVAKNDLAHQSLSKQLKDKTVDRHYLALVHGHVPHPKGTIDAPIGRDSKDRKKYAVTENGKEAITHFDLIRYFGQDYSLIQCQLETGRTHQIRVHLAYIGFPLAGDPLYGPKKTLEGPGQYLHAKTLGFDHPRTGQRLSFTSDLPQVFQQTLKELDLKYK

SEQ ID NO: 4129 - DNA, 471 bp, Alloiococcus otitidis
  CDS (4)..(468)
agcatgatccaatattattttatcagcttggtcattatcattcttgaccaattaaccaagtatttaacagccagcaatctagacttaggccagactataaacttgattcccaatgtcttgtctttgacccatgtccaaaacactggggcagcttggagtatatttgaaggacagatggtctttttttaccttgtcaccatcttagtcgtggcctttttaatctaccttctccacaaggaaggtaagaagtcagccctcctggcaacggctattgcttttatgattggtggcgccctgggtaactttattgaccgcctattccaccagtacgttatcgatatgatccaagttgactttatgtcctttccaatctttaatattgctgatatagccctaacaactggggttattttgatgcttgtagcagtcctttacgacgaatacatgatgaaaggaggggaggaaggatga

SEQ ID NO: 4130 - protein, 155 aa, Alloiococcus otitidis
MIQYYFISLVIIILDQLTKYLTASNLDLGQTINLIPNVLSLTHVQNTGAAWSIFEGQMVFFYLVTILVVAFLIYLLHKEGKKSALLATAIAFMIGGALGNFIDRLFHQYVIDMIQVDFMSFPIFNIADIALTTGVILMLVAVLYDEYMMKGGEEG

SEQ ID NO: 4131 - DNA, 693 bp, Alloiococcus otitidis
  CDS (163)..(690)
aatggaaataccaatcttacattacgaaggagtttgaacttgaataaattagtcaagacactggttagttcttccagcctttttctacttgctggatgcactaattatagtatatcaagcgtcagtgatacaacaagtaatcttcaagaagatagtcaggccatggtagaccaatttaatgagctctacgatacagaggctgacttaatggatacttttgaagaagaccttggatctgaagaaggtttagatcgtttcacaagtgaagatgctgaagtttttgaaaatgtcaaccaacggcgcgaacaagtggaaagtattttggacctcaaccaaagcatcactgaccaggctgattatttagcagattatgacggtgaggaactgaaccaagaagaagtccaagccttggctgacaacttacataattttactgaccaagttgaagcctataccgaccaataccaaactagtttagataaccaggaaactttcttccaagatattggctccgatgaagtctcgggggaagaatttctccaaggtctagaagatattgaagcagaggatgaagacttgaagaaccaagcctccgatttaaatgcagaatttgatcaaattttggaccaaatcgatgactttgcccaaagtgttaacgaggaagaaaacaatcaggaaggtgaaaacgaatga

SEQ ID NO: 4132 - protein, 176 aa, Alloiococcus otitidis
MVDQFNELYDTEADLMDTFEEDLGSEEGLDRFTSEDAEVFENVNQRREQVESILDLNQSITDQADYLADYDGEELNQEEVQALADNLHNFTDQVEAYTDQYQTSLDNQETFFQDIGSDEVSGEEFLQGLEDIEAEDEDLKNQASDLNAEFDQILDQIDDFAQSVNEEENNQEGENE

SEQ ID NO: 4133 - DNA, 693 bp, Alloiococcus otitidis; identical to SEQ ID NO: 4131
  CDS (34)..(690)

SEQ ID NO: 4134 - protein, 219 aa, Alloiococcus otitidis
MNLNKLVKTLVSSSSLFLLAGCTNYSISSVSDTTSNLQEDSQAMVDQFNELYDTEADLMDTFEEDLGSEEGLDRFTSEDAEVFENVNQRREQVESILDLNQSITDQADYLADYDGEELNQEEVQALADNLHNFTDQVEAYTDQYQTSLDNQETFFQDIGSDEVSGEEFLQGLEDIEAEDEDLKNQASDLNAEFDQILDQIDDFAQSVNEEENNQEGENE

SEQ ID NO: 4135 - DNA, 306 bp, Alloiococcus otitidis
  CDS (13)..(303)
cagagattttgcatgaccacgacgttcctgctattttcttcgtcaatgctatgtacttggatgaccaagaaggccaagaccaactccaagccatccacgacatgggctttgaaattggcaaccacacctataaccaccccaacctgcaagaaatatctgaagaagcccaaagagctgagatcgttgataccaacgaccgagttgaagaactcattggggttagacctcgctttttccgcccaccctttggggctcagaccgactactcctaccaggtggctgaagaagaaggcatgcagtctatga

SEQ ID NO: 4136 - protein, 97 aa, Alloiococcus otitidis
MTTTFLLFSSSMLCTWMTKKAKTNSKPSTTWALKLATTPITTPTCKKYLKKPKELRSLIPTTELKNSLGLDLAFSAHPLGLRPTTPTRWLKKKACSL

SEQ ID NO: 4137 - DNA, 846 bp, Alloiococcus otitidis
  CDS (7)..(843)
aaacgaatgaaaaataaaatgaaaggcttcttacccctcctagtcgctcccctcatcttggtagcttgctcaggtgaccaagaagaccaagaaaatgaagcccaagaggaaaacactgaagaagtagaagaccaacaaggtcaagatggccaagaagctagcaatgaaagcgaccaggctgaagcggaccaagaagcacagtacacattaaatgaagaaagctttcggattgaaccgattgaaggaagcggagcggacagtcaggtggtcctgatgacctttgatgatgcgcctgacaattatgccttagagatagcagagattttgcatgaccacgacgttcctgctattttcttcgtcaatgctatgtacttggatgaccaagaaggccaagaccaactccaagccatccacgacatgggctttgaaattggcaaccacacctataaccaccccaacctgcaagaaatatctgaagaagcccaaagagctgagatcgttgataccaacgaccgagttgaagaactcattggggttagacctcgctttttccgcccaccctttggggctcagaccgactactcctaccaggtggctgaagaagaaggcatgcagtctatgaactggtcttatggctacgactgggagagccagtaccaagaccccgatgccctagcagacattatggtgaatagtgaattcttatccgatggtgctaacttgctcatgcacgaccgagagtggaccaaggatgctgttgaagatattatcctcggttttgaagaaaaaggatatgggtttgtcgaccctagtttaattgaaagtgggaataaagatgccgcataa

SEQ ID NO: 4138 - protein, 279 aa, Alloiococcus otitidis
MKNKMKGFLPLLVAPLILVACSGDQEDQENEAQEENTEEVEDQQGQDGQEASNESDQAEADQEAQYTLNEESFRIEPIEGSGADSQVVLMTFDDAPDNYALEIAEILHDHDVPAIFFVNAMYLDDQEGQDQLQAIHDMGFEIGNHTYNHPNLQEISEEAQRAEIVDTNDRVEELIGVRPRFFRPPFGAQTDYSYQVAEEEGMQSMNWSYGYDWESQYQDPDALADIMVNSEFLSDGANLLMHDREWTKDAVEDIILGFEEKGYGFVDPSLIESGNKDAA

SEQ ID NO: 4139 - DNA, 288 bp, Alloiococcus otitidis
  CDS (1)..(285)
ttggaagctaacttccagctaggcttttcatttctattctgcttcgctttcattttctgtttgtccctcaaaggagtaggtagcaccctgggagtagttgttgctagcatcccaaaggaggaactcatcaaccccattatcatggagggccttgacttggtcggtgacttcttgcgcaccatattccttgtagtttcctgctccaaggtagctagctgtaaagtcttggatccaaggtctggattggggtgcatcactgcccagttcatcgaggaggacattttctaa

SEQ ID NO: 4140 - protein, 95 aa, Alloiococcus otitidis
MEANFQLGFSFLFCFAFIFCLSLKGVGSTLGVVVASIPKEELINPIIMEGLDLVGDFLRTIFLVVSCSKVASCKVLDPRSGLGCITAQFIEEDIF

SEQ ID NO: 4141 - DNA, 1392 bp, Alloiococcus otitidis
  CDS (19)..(1389)
ttgaaagtgggaataaagatgccgcataaaaaattaatcggctcgctggtcagtttcctaatcttgtcttcagctagcctccctgccctagcccaagaagaaagtgaccaagctgacgaaaatacagaagctgtccaagaccaagaaacagacggtcaggaagaccaagaggaccaagcaggttcagaaaatgaagaagatggtggtgaagaagctggcgatgatcaagaccaggaagtggaattggatggccccctccgcattaatgaagatcctatcctagccatccccaaaaacttccctcccgaattgtcttacggtcccgatgaagttgtagcctaccctgaagatggggttaaggggatttacgtaaccggcccaacgacagcagaagctaacttccaaaacttaatcaacatggtgaattccactgacttgaactccatggtgatcgatgtcaaggaagattacgggcaagtcgttttggattttgacagcgatagccaggccatccaaaatgccagcaaccccttttctgatgctgaggaagttgttgagacccttaaggaaaatgacatctaccctatcgcccggattgttgtctttaaagatacagtcctagctgaagaaagaccggacttatcctttacccaggcggatggaacgctttggaaaaatggccggggcgaagccttcgttaacccttacgagcaggaagtttgggactacaacattgaaatcgccaaggcagccgctgaagttggcttccgcgatatccaatttgactatgtccgcttcccagaaggttttgaaactcgggacgaagaactccaatacagtcggggcaaatatgatgactccactacaaattctgaacaaaggattgacaccgttaagagctttgtcgaacatgccagaaatgaactcatcccttataatgtggacgtttccgttgatatttttggctatgcagcagctatccaagaagcacctggtatcggacaaagcttccaaggtatttctgaacatgtggatgccatttcggccatggtctaccctagccactgggggccaggtaactttggcattgaaaagcccgacctagaaccttacagcactgtcgatgaatacatgaagttagaaaatgtcctcctcgatgaactgggcagtgatgcaccccaatccagaccttggatccaagactttacagctagctaccttggagcaggaaactacaaggaatatggtgcgcaagaagtcaccgaccaagtcaaggccctccatgataatggggttgatgagttcctcctttgggatgctagcaacaactactcccagggtgctacctactcctttgagggacaaacagaaaatgaaagcgaagcagaatag

SEQ ID NO: 4142 - protein, 457 aa, Alloiococcus otitidis
MPHKKLIGSLVSFLILSSASLPALAQEESDQADENTEAVQDQETDGQEDQEDQAGSENEEDGGEEAGDDQDQEVELDGPLRINEDPILAIPKNFPPELSYGPDEVVAYPEDGVKGIYVTGPTTAEANFQNLINMVNSTDLNSMVIDVKEDYGQVVLDFDSDSQAIQNASNPFSDAEEVVETLKENDIYPIARIVVFKDTVLAEERPDLSFTQADGTLWKNGRGEAFVNPYEQEVWDYNIEIAKAAAEVGFRDIQFDYVRFPEGFETRDEELQYSRGKYDDSTTNSEQRIDTVKSFVEHARNELIPYNVDVSVDIFGYAAAIQEAPGIGQSFQGISEHVDAISAMVYPSHWGPGNFGIEKPDLEPYSTVDEYMKLENVLLDELGSDAPQSRPWIQDFTASYLGAGNYKEYGAQEVTDQVKALHDNGVDEFLLWDASNNYSQGATYSFEGQTENESEAE

SEQ ID NO: 4143 - DNA, 1392 bp, Alloiococcus otitidis; identical to SEQ ID NO: 4141
  CDS (7)..(1389)

SEQ ID NO: 4144 - protein, 461 aa, Alloiococcus otitidis
MGIKMPHKKLIGSLVSFLILSSASLPALAQEESDQADENTEAVQDQETDGQEDQEDQAGSENEEDGGEEAGDDQDQEVELDGPLRINEDPILAIPKNFPPELSYGPDEVVAYPEDGVKGIYVTGPTTAEANFQNLINMVNSTDLNSMVIDVKEDYGQVVLDFDSDSQAIQNASNPFSDAEEVVETLKENDIYPIARIVVFKDTVLAEERPDLSFTQADGTLWKNGRGEAFVNPYEQEVWDYNIEIAKAAAEVGFRDIQFDYVRFPEGFETRDEELQYSRGKYDDSTTNSEQRIDTVKSFVEHARNELIPYNVDVSVDIFGYAAAIQEAPGIGQSFQGISEHVDAISAMVYPSHWGPGNFGIEKPDLEPYSTVDEYMKLENVLLDELGSDAPQSRPWIQDFTASYLGAGNYKEYGAQEVTDQVKALHDNGVDEFLLWDASNNYSQGATYSFEGQTENESEAE

SEQ ID NO: 4145 - DNA, 1392 bp, Alloiococcus otitidis; identical to SEQ ID NO: 4141
  CDS (1)..(1389)

SEQ ID NO: 4146 - protein, 463 aa, Alloiococcus otitidis
MKVGIKMPHKKLIGSLVSFLILSSASLPALAQEESDQADENTEAVQDQETDGQEDQEDQAGSENEEDGGEEAGDDQDQEVELDGPLRINEDPILAIPKNFPPELSYGPDEVVAYPEDGVKGIYVTGPTTAEANFQNLINMVNSTDLNSMVIDVKEDYGQVVLDFDSDSQAIQNASNPFSDAEEVVETLKENDIYPIARIVVFKDTVLAEERPDLSFTQADGTLWKNGRGEAFVNPYEQEVWDYNIEIAKAAAEVGFRDIQFDYVRFPEGFETRDEELQYSRGKYDDSTTNSEQRIDTVKSFVEHARNELIPYNVDVSVDIFGYAAAIQEAPGIGQSFQGISEHVDAISAMVYPSHWGPGNFGIEKPDLEPYSTVDEYMKLENVLLDELGSDAPQSRPWIQDFTASYLGAGNYKEYGAQEVTDQVKALHDNGVDEFLLWDASNNYSQGATYSFEGQTENESEAE

SEQ ID NO: 4147 - DNA, 3804 bp, Alloiococcus otitidis
  CDS (145)..(3801)
cccatttgcaaaaactctaccaaaaagatggaggagaccatgacccaagacactaaacctaattatacacctgaacaaaaagaagccatctaccatactggccatgatattctagtttcggcctcggctggttcgggaaaaaccatggtcttggttgaacgcatccttaacttagtcagccaaggagccgatattaccgacttattggtagtgacctttaccaaggcggcggcccaggaaatgaaagaacggatccaggccaagatccaagaccaaattagccaggccccatctggcagtaaccttaaaaaccacctaattaagcaattacccttgatcaaccaagccaatatttccaccatccactccttttgttctaaggttatccaaaaatattactatttgattgatatggatccagtcttccgcatgttgacagaccaaaccgaaatcgacctggtccaagagcgtatattagatgactgcatcaatttgaagttagaagaccaaaaccctagcttttaccgcctgctagagatgtttgctggccctagtaacttggacccttttaaagacatggttcggtctatctatcaatctgccctggccagacccgacagtatcaaatggttgagtgagctgggccagacctaccaagtagatgacctcaaggacctttccatctaccaggatgaaattaaaggagacatccgctctagtttagacctggctatcgaccattacgaccagatcttaaacctggtccaaggggaggctggccttgaaaaattccaggacaaatttggggaagttcgccaaaaactagtcagttttcaagacctagtccaaaaagaccaattggatgacttttacctacaaggtcaagccatgaaatttcctaaaaaaccggcactgcccaaagactacaaggaagacccccattaccaggccctggatgaagaggtcaaggctttaaataatagtggtaaaaaagcttttaacagcctcattgaagactatttcaccatcaagcccagtgaccaagtggataagattaacaagttaagacccttggtggagtccttggttgaactccttttagaattccaccagtctttttcagctgaaaaagaaaagatgcgggccttagactttaatgacctggagcacaagacactcgatatcttaagccatgaatcaggggtggcccaggcttattaccaagatcttttccaagaaatcttaattgatgaataccaagacatcaatgtcctccaggaagctattttatccagcctggctaagccaggagcgggtaaccgctttatggtgggggatgtcaagcagtccatttatggcttccgcctggctgaacccaagctctttattgacaagtatgaccgctttggccacgacccggtcaaggagcggattatcttacaggaaaacttccggtcccgtaatacagtcttggactttatcaactatatctttcaccaaatcatggaccgggacctgggcgacgtagtttacgatcaagccgcccagttaaatgtgggtaacccaaactttcccaatgagacggatgacttggattccaagcaaactgaattcctcatctaccaaagcaagggggaagattcagatagggaaggggagatacccccccaagatgggatccgcgaaagtaaccaaggtcagtaccggatggtggcccaaaaaattaaggacctggtggattctggctttttgatttacgacaaaaaagcagaccgaaaccgccccctccaataccgagatattgctattttaaccccaaccaagaataacaacttggtgattagtgaagaatttaaggcattgggcatcccagtggctattaacaatactgaaaattacttccagcggaccgagatcaagaccatgatgtctatcttgaagattattgacaaccccttgcaagatattcccctggtcgccgtcttacggtccatggtcctgggtttaaccgaacccgaattagccaaaatccgtctcatcaaccgccagggcctctacttccatgccttagaagactatgccaaggccaagaagaacaaggttgaccctaacttgcaggtcaaggttcaaggctttttaagccagttggaagaatggcgggactatgctaaatttcattccctggtggacttgatctggaaggtttaccaagacaccaactacctagagtatgtggctggtttacagtcaggccaacaaaggcaaaacaacctccatgccctgtatgaacgagcaggggcctatgaagcttcttccttcaagggtcttttccaattcattaaatttattgaaagcatgcagaaaaaagacaaggacctggctgaacctgtcagtgtgacggaagatgaggatgctgtccgtgttatgaccatccatgctagcaagggcttagaatttcccatcgtctttttgaccgatagctctaagaaatttaatgtcagtgatgcccagggagactatgctgtcgacagccaccaaggtttggggctcaactatattgatactgaccaacagcttaaataccccacctggctcaacaagggtatccaagctaaacgaatgcggcagttgatttcagaacaaatgcgggtcctctatgttgcattgacccgggctgaacagaagctttttatcaccggtacgacaaagactaaagaagacctccttaagaagtggaagacggtccaaagtcagacgaataccaccttgtccattaaagaaaggctcaagcccgatgacggcttcctcaattggctgggtaaggggattatccgccaccccttgagccaagatttaagggaccaaaaggacagtccgctcctggctttccaagatatttcctttcaaattcacttcttcaatgaagccgacttggtcaaatctagttctaaccctgaccaaggaccaggggagggggatagtcaagatattaacactcaaacagctaagttaaatcctagccaagactggggccaggatgaagaagaccttaagcaagaactggaccaagccaaggcctatctttcctatcattacccccaccagcttgctgttaataccaccagctaccaatctgtttctgaaattaaacgcttttttgaagtagatgaaggattggaaaagatggacttcaccggtcaagggagcaaacccaaccgttatgtcagccaagacttagcagacccccaatttatccaaaagggaagccaggctaaaccttcttccaaggatatcgggtcagctacccacttagtcctacaaaaatgcgatctcagccagccagtgacagcccaggccatccaagccgtcatagaccagctggttaaccaggaagtgatcgaccaaaacttggcgaattacatcgaccaaaactccctggttaagttattcgcaggagaatttggccatttcttgcaagaccatgccagtcaggtcaaacgcgaacagcctttttctctcttgttggaagcaggcgaccttttccacttggatacccaggaagaggacagtgtattaatccacggggttattgatggttttgttcaagttggtaaggagattaccctctttgactacaagaccgaccagctaggccactatcaagatcccgaccaagtcttaagagagcgctacaaggggcaaatagccctttataaacgagccttagagactatttatcctgatagtcgggtcagtcatgcctacctggtctcaacagacctgaaccgggccattgaagtttaa

SEQ ID NO: 4148 - protein, 1219 aa, Alloiococcus otitidis
MVLVERILNLVSQGADITDLLVVTFTKAAAQEMKERIQAKIQDQISQAPSGSNLKNHLIKQLPLINQANISTIHSFCSKVIQKYYYLIDMDPVFRMLTDQTEIDLVQERILDDCINLKLEDQNPSFYRLLEMFAGPSNLDPFKDMVRSIYQSALARPDSIKWLSELGQTYQVDDLKDLSIYQDEIKGDIRSSLDLAIDHYDQILNLVQGEAGLEKFQDKFGEVRQKLVSFQDLVQKDQLDDFYLQGQAMKFPKKPALPKDYKEDPHYQALDEEVKALNNSGKKAFNSLIEDYFTIKPSDQVDKINKLRPLVESLVELLLEFHQSFSAEKEKMRALDFNDLEHKTLDILSHESGVAQAYYQDLFQEILIDEYQDINVLQEAILSSLAKPGAGNRFMVGDVKQSIYGFRLAEPKLFIDKYDRFGHDPVKERIILQENFRSRNTVLDFINYIFHQIMDRDLGDVVYDQAAQLNVGNPNFPNETDDLDSKQTEFLIYQSKGEDSDREGEIPPQDGIRESNQGQYRMVAQKIKDLVDSGFLIYDKKADRNRPLQYRDIAILTPTKNNNLVISEEFKALGIPVAINNTENYFQRTEIKTMMSILKIIDNPLQDIPLVAVLRSMVLGLTEPELAKIRLINRQGLYFHALEDYAKAKKNKVDPNLQVKVQGFLSQLEEWRDYAKFHSLVDLIWKVYQDTNYLEYVAGLQSGQQRQNNLHALYERAGAYEASSFKGLFQFIKFIESMQKKDKDLAEPVSVTEDEDAVRVMTIHASKGLEFPIVFLTDSSKKFNVSDAQGDYAVDSHQGLGLNYIDTDQQLKYPTWLNKGIQAKRMRQLISEQMRVLYVALTRAEQKLFITGTTKTKEDLLKKWKTVQSQTNTTLSIKERLKPDDGFLNWLGKGIIRHPLSQDLRDQKDSPLLAFQDISFQIHFFNEADLVKSSSNPDQGPGEGDSQDINTQTAKLNPSQDWGQDEEDLKQELDQAKAYLSYHYPHQLAVNTTSYQSVSEIKRFFEVDEGLEKMDFTGQGSKPNRYVSQDLADPQFIQKGSQAKPSSKDIGSATHLVLQKCDLSQPVTAQAIQAVIDQLVNQEVIDQNLANYIDQNSLVKLFAGEFGHFLQDHASQVKREQPFSLLLEAGDLFHLDTQEEDSVLIHGVIDGFVQVGKEITLFDYKTDQLGHYQDPDQVLRERYKGQIALYKRALETIYPDSRVSHAYLVSTDLNRAIEV

SEQ ID NO: 4149 - DNA, 3804 bp, Alloiococcus otitidis; identical to SEQ ID NO: 4147
  CDS (28)..(3801)

SEQ ID NO: 4150 - protein, 1258 aa, Alloiococcus otitidis
MEETMTQDTKPNYTPEQKEAIYHTGHDILVSASAGSGKTMVLVERILNLVSQGADITDLLVVTFTKAAAQEMKERIQAKIQDQISQAPSGSNLKNHLIKQLPLINQANISTIHSFCSKVIQKYYYLIDMDPVFRMLTDQTEIDLVQERILDDCINLKLEDQNPSFYRLLEMFAGPSNLDPFKDMVRSIYQSALARPDSIKWLSELGQTYQVDDLKDLSIYQDEIKGDIRSSLDLAIDHYDQILNLVQGEAGLEKFQDKFGEVRQKLVSFQDLVQKDQLDDFYLQGQAMKFPKKPALPKDYKEDPHYQALDEEVKALNNSGKKAFNSLIEDYFTIKPSDQVDKINKLRPLVESLVELLLEFHQSFSAEKEKMRALDFNDLEHKTLDILSHESGVAQAYYQDLFQEILIDEYQDINVLQEAILSSLAKPGAGNRFMVGDVKQSIYGFRLAEPKLFIDKYDRFGHDPVKERIILQENFRSRNTVLDFINYIFHQIMDRDLGDVVYDQAAQLNVGNPNFPNETDDLDSKQTEFLIYQSKGEDSDREGEIPPQDGIRESNQGQYRMVAQKIKDLVDSGFLIYDKKADRNRPLQYRDIAILTPTKNNNLVISEEFKALGIPVAINNTENYFQRTEIKTMMSILKIIDNPLQDIPLVAVLRSMVLGLTEPELAKIRLINRQGLYFHALEDYAKAKKNKVDPNLQVKVQGFLSQLEEWRDYAKFHSLVDLIWKVYQDTNYLEYVAGLQSGQQRQNNLHALYERAGAYEASSFKGLFQFIKFIESMQKKDKDLAEPVSVTEDEDAVRVMTIHASKGLEFPIVFLTDSSKKFNVSDAQGDYAVDSHQGLGLNYIDTDQQLKYPTWLNKGIQAKRMRQLISEQMRVLYVALTRAEQKLFITGTTKTKEDLLKKWKTVQSQTNTTLSIKERLKPDDGFLNWLGKGIIRHPLSQDLRDQKDSPLLAFQDISFQIHFFNEADLVKSSSNPDQGPGEGDSQDINTQTAKLNPSQDWGQDEEDLKQELDQAKAYLSYHYPHQLAVNTTSYQSVSEIKRFFEVDEGLEKMDFTGQGSKPNRYVSQDLADPQFIQKGSQAKPSSKDIGSATHLVLQKCDLSQPVTAQAIQAVIDQLVNQEVIDQNLANYIDQNSLVKLFAGEFGHFLQDHASQVKREQPFSLLLEAGDLFHLDTQEEDSVLIHGVIDGFVQVGKEITLFDYKTDQLGHYQDPDQVLRERYKGQIALYKRALETIYPDSRVSHAYLVSTDLNRAIEV

SEQ ID NO: 4151 - DNA, 282 bp, Alloiococcus otitidis
  CDS (22)..(279)
ttgatgaataccaagacatcaatgtcctccaggaagctattttatccagcctggctaagccaggagcgggtaaccgctttatggtgggggatgtcaagcagtccatttatggcttccgcctggctgaacccaagctctttattgacaagtatgaccgctttggccacgacccggtcaaggagcggattatcttacaggaaaacttccggtcccgtaatacagtcttggactttatcaactatatctttcaccaaatcatggaccgggacctgggcgacgtag

SEQ ID NO: 4152 - protein, 86 aa, Alloiococcus otitidis
MSSRKLFYPAWLSQERVTALWWGMSSSPFMASAWLNPSSLLTSMTALATTRSRSGLSYRKTSGPVIQSWTLSTISFTKSWTGTWAT

SEQ ID NO: 4153 - DNA, 282 bp, Alloiococcus otitidis; identical to SEQ ID NO: 4151
  CDS (4)..(279)

SEQ ID NO: 4154 - protein, 92 aa, Alloiococcus otitidis
MNTKTSMSSRKLFYPAWLSQERVTALWWGMSSSPFMASAWLNPSSLLTSMTALATTRSRSGLSYRKTSGPVIQSWTLSTISFTKSWTGTWAT

SEQ ID NO: 4155 - DNA, 306 bp, Alloiococcus otitidis
  CDS (34)..(303)
tatttttggataaccttagaacaaaaggagtggatggtggaaatattggcttggttgatcaagggtaattgcttaattaggtggtttttaaggttactgccagatggggcctggctaatttggtcttggatcttggcctggatccgttctttcatttcctgggccgccgccttggtaaaggtcactaccaataagtcggtaatatcggctccttggctgactaagttaaggatgcgttcaaccaagaccatggtttttcccgaaccagccgaggccgaaactagaatatcatggccagtatggtag

SEQ ID NO: 4156 - protein, 90 aa, Alloiococcus otitidis
MVEILAWLIKGNCLIRWFLRLLPDGAWLIWSWILAWIRSFISWAAALVKVTTNKSVISAPWLTKLRMRSTKTMVFPEPAEAETRISWPVW

SEQ ID NO: 4157 - DNA, 3654 bp, Alloiococcus otitidis
  CDS (25)..(3651)
aaactaagagaaagaaggctcaagatgggactacacttcaagctagggcggaaccggctcaaccaggaccaggtcagggcccagcaactatttgacctggttcagcaagaagatttagaccaggtttattacctgatccccgaccacctcaaatttgaatcagaagtcaatatattagactttttcaaagagaaaagccaggccaaagcagctggcatgatcaaagtccaggtttacagttttacccggcttgcttgggccttgctgtcggattcggccatggttaaccggactcgcctatcccaaacaggtctagcggtcatggtcaaaaaaataatgctggagttaaagcaagacaaggtagacctcctagtttaccaaggacaagaggcctatccgggctttatcagtaagttgaccgacctcctcttggaatttcgttcgggtttgatcgaagctgaggacctgacccaaataaaggatcagttggatcaagaggggcaaagctttcggaaactggctgacttagaaaaaatctaccccaaatttttagaggaattgagtcaaaaatacttagaccaagaagatattttaaagaccctagtcgattatattaaaggtcatgacttttcccaaactgtttttgtcattgaccattacgacagtttttctagccaggagatggacttgataaaagccctcttagaaaatgccaaagacgtctacctctacttaaacctggacaaggcttaccctaataactatccccccctcctagatattttttaccagtcgggcaagacctaccagcaggtctttcaactagcccagaccatcccagacctagctatccaaacagactatattgacccatccggctaccaagtagggattaagcccggcattttagacttggaagactattggtatcgaacttatagtcaaaaccagaagggtagtccagtccagtccagccaattgaaagaccgggttcagattactgaagttttaactatccaagatgaagtccactacctagccaataaaatcaagcaatttgtcgcttctgcttcctaccgttacaaggatattttggtagtgggtcgggatctctctgattacaaaaatagcttggttcctatctttaaccaagaagggatacccgtcttctttgacctaacagattccatgagccagcaccccctcgtggaatttttgctagctgccatccgaatcgtcctctacaacttccagtacccagatgtcatgcgttttttacggtcagagttatacttgccaaatgaccaagaaaaaaccaccagtccaaaggcttggcgggccaaggtagaccaaactgaaaacgtcctcttagcctatggttaccaaggaccggcctggaccaggggtgaggattgggtttatgaccggatcagtaggggaagggaagaccaggagcaaagtctagaagaaaaacgaatccaagaaaccagtaaccaggtcagaagtcaactccaccgcttgtttgaccccttgatcaaaagcttaaaccaagaccacataaccaaccgacaggcaatgctagctatttatgattttatggaaaaatgtcaggtgaaggaccgaattttagcctggcgggaccaggccttagaagcccaagatctagaccagtctaagcgtcacgagcaggcctggcatagtcttatctccctttttgatgaatatattgaagtaatgggggactacccatgggacggggaagaatttcttgccatgattgagcttgcctttgaaagcacggaattttctaacgttccaccaaggctggaccaggttacggtgactagtcgactggactgggaccggaccagccgtcatcccatcgtcttttaccttggcatgaacgaaagtaactttccccaagctattgacaaccaaagtattttagacgaccaagaccggcaagtcttccaggactacctccaagagaatcctttaaaaaatttgcggtctagtagtgaggaaaggttggctgacgaagcttatacagcttacaaggcttttaacctagccagccagtaccttttctttagctatagtcaaaaacaagatggggcttcagaccatagtctcagtccctatctcaaacaagttcagcaggcctttgaccttgagatataccagcagggaaggttaggagacttaatccaggacccccatccgaaagatttagaccaagtcctggcttccaagtaccaattggccaacctaaccctcttggctttccgcttagacagggaaaagcaaattcctctccaccccctatgggccaagctggcaacttacttggctgcccaagaccaggggcaattaagaaggattttttcatccttggactttaaaaatatcccagtcccattaggggaaaaactggcccaagacttgtacggtaaggacctttacttgtctgtctcccagcttgagacctactataaggacccctacaatcacttcttgcagtacggcttgaaattaaaagaccgagaccaattagaattgactccggcagagtccggttcttactaccatgacatcttagaccaggtcatcagtgaagttatcgcctccaagcaagatctggcagacatagacccggccgacctagaagacttggcccaagaccgagccagaaacttgttagaagacccccgctacaaggttctatcagcttccaatcagatggctttcataagagaccaactccttaaaaatgttaaccgccgtcttaaatccacccacaagcactttcagtcctcccatatgcggccctacctgactgaattaaactttggcctgggctcgtctgacaccagcctgccagcctatgaaattcctttaagtgaccagtccactgtttacttgcggggtaaaatcgaccgggtggacttgatgtctgacccaaatcggggagaagaccacaagtatttgcaaattgtcgactacaagtccagcaaaaaaagccttaaggcaagtgaattaaatgccggtctgtccttgcaactcttgacctactttgatacagtcttaaaatattatgaccagctagacttaaacttagcaggcctaaaacccctggctgccctttattctcagatccatatgcctaaaatcatggtagacaagcttttaaatgaagccgacctaaaccaaaaaatcaataaggaattaaaataccagggcctcttgctggatgaacccaaagcattagacctactagatgtgaacctacaagacactaatggttattctgactactatccctacatgaaaaagaaagatggtagtttttcaatccgaagacccaaccaattgattaaaccagcagacttggaattgttgctccaccacaaccggcaattaatcgctaaagctggccaagacatcctctctggcaagttagtgatgaaaccttattatggagtggaccatattgatactgtttcagggccctaccacgctatttcccaatttgatgttttgctagcagaaaaccagtaccaatacttaacaacctttgattcgatggaagactatctagcccatttgcaaaaactctaccaaaaagatggaggagaccatgacccaagacactaa

SEQ ID NO: 4158 - protein, 1209 aa, Alloiococcus otitidis
MGLHFKLGRNRLNQDQVRAQQLFDLVQQEDLDQVYYLIPDHLKFESEVNILDFFKEKSQAKAAGMIKVQVYSFTRLAWALLSDSAMVNRTRLSQTGLAVMVKKIMLELKQDKVDLLVYQGQEAYPGFISKLTDLLLEFRSGLIEAEDLTQIKDQLDQEGQSFRKLADLEKIYPKFLEELSQKYLDQEDILKTLVDYIKGHDFSQTVFVIDHYDSFSSQEMDLIKALLENAKDVYLYLNLDKAYPNNYPPLLDIFYQSGKTYQQVFQLAQTIPDLAIQTDYIDPSGYQVGIKPGILDLEDYWYRTYSQNQKGSPVQSSQLKDRVQITEVLTIQDEVHYLANKIKQFVASASYRYKDILVVGRDLSDYKNSLVPIFNQEGIPVFFDLTDSMSQHPLVEFLLAAIRIVLYNFQYPDVMRFLRSELYLPNDQEKTTSPKAWRAKVDQTENVLLAYGYQGPAWTRGEDWVYDRISRGREDQEQSLEEKRIQETSNQVRSQLHRLFDPLIKSLNQDHITNRQAMLAIYDFMEKCQVKDRILAWRDQALEAQDLDQSKRHEQAWHSLISLFDEYIEVMGDYPWDGEEFLAMIELAFESTEFSNVPPRLDQVTVTSRLDWDRTSRHPIVFYLGMNESNFPQAIDNQSILDDQDRQVFQDYLQENPLKNLRSSSEERLADEAYTAYKAFNLASQYLFFSYSQKQDGASDHSLSPYLKQVQQAFDLEIYQQGRLGDLIQDPHPKDLDQVLASKYQLANLTLLAFRLDREKQIPLHPLWAKLATYLAAQDQGQLRRIFSSLDFKNIPVPLGEKLAQDLYGKDLYLSVSQLETYYKDPYNHFLQYGLKLKDRDQLELTPAESGSYYHDILDQVISEVIASKQDLADIDPADLEDLAQDRARNLLEDPRYKVLSASNQMAFIRDQLLKNVNRRLKSTHKHFQSSHMRPYLTELNFGLGSSDTSLPAYEIPLSDQSTVYLRGKIDRVDLMSDPNRGEDHKYLQIVDYKSSKKSLKASELNAGLSLQLLTYFDTVLKYYDQLDLNLAGLKPLAALYSQIHMPKIMVDKLLNEADLNQKINKELKYQGLLLDEPKALDLLDVNLQDTNGYSDYYPYMKKKDGSFSIRRPNQLIKPADLELLLHHNRQLIAKAGQDILSGKLVMKPYYGVDHIDTVSGPYHAISQFDVLLAENQYQYLTTFDSMEDYLAHLQKLYQKDGGDHDPRH

SEQ ID NO: 4159 - DNA, 1398 bp, Alloiococcus otitidis
  CDS (157)..(1395)
ccccggccaccatatcgaggccatctgcatccccaaactggcccaaaaagtccaagaatggatccaagcatacaagtggcccatccaggtggtccaatctcaggtcaataccgaacccttcgaattctataccaagtaaagaaagcaggttatactatgtcaaagcaattagaagaaagattcctttcctacgttaaaaagaatacccggtcaaatgaagccagcactagtgttccatcgacttctattcaaaccgattttttaaaagacttggaacttgagctaaaagacttgggctttgccgatgtcaggttaaaccccaaagactcttatttaactgctagaattccggccaatacagaccagccagccccaacgattggctttatctcccatgtggacacggccgacttcgagtccgaaaacatccaaccgcaaaaacacgtaaattacgatggccaccccattatccttaaccaagaagaggacatcaccctggacccaagtgaattccctaacttgaaaaactatgtgggccaaaccttgattaccacagatggaaccaccctcttagggtctgatgacaagtcaggtgtggcggagattgtcactgccggggctcgtttgcttgataacccagatattaaacacggggaaatccggctagcttttggcccagatgaagaaattgggcgtggagctgacttgtttgacttagccaacttcccttgtgactttgcctacaccgttgatgggggaccagtgggtgaattgcaatacgaaagtttcaatgctgcccaggctaaaattactattaagggtaaaaatgtccaccccggcaaggccaaagactctatggttaacgctcttgagttagcccgggccttccagaacaagttgcctgacgaccaggtccctgaaaaaaccaatggccgggaaggcttctaccacttaaccaatctcaatggccgggtagaagaagccgagttagtctatattatccgggaccatgacaacaaactcttcaaggagaaaaaggcctatattgaaaaagttgcccaggaattgaataaaacactagacaaggaccgggtctttgtcgacatggaggaccagtattacaatatggctgacattatcaaaaaagacctcaccccagtagacttagctcaaaaagccatggaagccttggatattgaccccatcatcgagcctattcgtggaggaacagatgggtctaagctttcctttagaggtttgccttgtcccaacttgtttgcaggaggagaaaacttccacggtcgttatgaatttgttgccttagaaagcatggaaaaagcctgccaagtcatcttaaaaattgcccagttggctgtgtctggtaaaaatgaaaactaa

SEQ ID NO: 4160 - protein, 413 aa, Alloiococcus otitidis
MSKQLEERFLSYVKKNTRSNEASTSVPSTSIQTDFLKDLELELKDLGFADVRLNPKDSYLTARIPANTDQPAPTIGFISHVDTADFESENIQPQKHVNYDGHPIILNQEEDITLDPSEFPNLKNYVGQTLITTDGTTLLGSDDKSGVAEIVTAGARLLDNPDIKHGEIRLAFGPDEEIGRGADLFDLANFPCDFAYTVDGGPVGELQYESFNAAQAKITIKGKNVHPGKAKDSMVNALELARAFQNKLPDDQVPEKTNGREGFYHLTNLNGRVEEAELVYIIRDHDNKLFKEKKAYIEKVAQELNKTLDKDRVFVDMEDQYYNMADIIKKDLTPVDLAQKAMEALDIDPIIEPIRGGTDGSKLSFRGLPCPNLFAGGENFHGRYEFVALESMEKACQVILKIAQLAVSGKNEN

SEQ ID NO: 4161 - DNA, 1398 bp, Alloiococcus otitidis; identical to SEQ ID NO: 4159
  CDS (58)..(1395)

SEQ ID NO: 4162 - protein, 446 aa, Alloiococcus otitidis
MDPSIQVAHPGGPISGQYRTLRILYQVKKAGYTMSKQLEERFLSYVKKNTRSNEASTSVPSTSIQTDFLKDLELELKDLGFADVRLNPKDSYLTARIPANTDQPAPTIGFISHVDTADFESENIQPQKHVNYDGHPIILNQEEDITLDPSEFPNLKNYVGQTLITTDGTTLLGSDDKSGVAEIVTAGARLLDNPDIKHGEIRLAFGPDEEIGRGADLFDLANFPCDFAYTVDGGPVGELQYESFNAAQAKITIKGKNVHPGKAKDSMVNALELARAFQNKLPDDQVPEKTNGREGFYHLTNLNGRVEEAELVYIIRDHDNKLFKEKKAYIEKVAQELNKTLDKDRVFVDMEDQYYNMADIIKKDLTPVDLAQKAMEALDIDPIIEPIRGGTDGSKLSFRGLPCPNLFAGGENFHGRYEFVALESMEKACQVILKIAQLAVSGKNEN

SEQ ID NO: 4163 - DNA, 1176 bp, Alloiococcus otitidis
  CDS (46)..(1173)
aagaagtcaaagaaaaggtcaagcaattggaggaattactcaaccatgaccagcattaaggaatttgtctcagtttacgaaaaatttgcccctaaaaaattaatcatgggaggggacccaaccggccttcactttggccaccctgaccaagaaatcactaaagtcatgactactttagatgttagacctgaagtggtcgatgaagctgtggctaggggggtcgactttatcttggcccaccaccctcctatctttaagcctgccaaaaccctggtggaagatgatcctcaaaatcatatgtacgcccagctgatccgccacaatattggggtatatgcttcccataccaatttggatgtcgtggctggtggaatgaacgattggctagcagacgccttagacctgaccaatctccaaattttaagcccgacctaccaggcagaccagtacaaattagtggtttatgtcccccaagaagcgagcgaccaagtcttatcggcctgccatgacaagggagcaggacaggtgggagacttctaccaggatgtttctacttctatccctgctttaggtcgctttacccctaaagctggtgccaaaccagctattggccaggttgatcaggcagaagaagtccaggaagaccggcttgaagtcttggtagacgaagacgatttggaccaggtcattttggccctacttgaagcccatccttacgaagaacccgtttacgatgtctttaagctggaagggaattgtaaaagtcagggaattggccgggttggagacctaagccaagttatgaccctggaagacctcctggcccatatcaaaaaaagttttgacctccaaggcttgagatatgtccaagttcccaataccaagcaaaaaaccttccaaaaaatagccatctgtggtggagatgggtcttcctttatccaagatgccatcaattcgggagctgatgcctatatcactggtgatgtttattaccacacagcccatgacctccaggctgccggtctaaccgtgattgaccccggccaccatatcgaggccatctgcatccccaaactggcccaaaaagtccaagaatggatccaagcatacaagtggcccatccaggtggtccaatctcaggtcaataccgaacccttcgaattctataccaagtaa

SEQ ID NO: 4164 - protein, 376 aa, Alloiococcus otitidis
MTSIKEFVSVYEKFAPKKLIMGGDPTGLHFGHPDQEITKVMTTLDVRPEVVDEAVARGVDFILAHHPPIFKPAKTLVEDDPQNHMYAQLIRHNIGVYASHTNLDVVAGGMNDWLADALDLTNLQILSPTYQADQYKLVVYVPQEASDQVLSACHDKGAGQVGDFYQDVSTSIPALGRFTPKAGAKPAIGQVDQAEEVQEDRLEVLVDEDDLDQVILALLEAHPYEEPVYDVFKLEGNCKSQGIGRVGDLSQVMTLEDLLAHIKKSFDLQGLRYVQVPNTKQKTFQKIAICGGDGSSFIQDAINSGADAYITGDVYYHTAHDLQAAGLTVIDPGHHIEAICIPKLAQKVQEWIQAYKWPIQVVQSQVNTEPFEFYTK

SEQ ID NO: 4165 - DNA, 732 bp, Alloiococcus otitidis
  CDS (205)..(729)
aatataaaattaaaggatgaccttatggaattatcaaaccgtttgcaagttatagctgacctggtccccctagacaccgcttgcctggctgatattggttcggaccacgcctacctaccaatttacttaatccaaaataatcgggtgggtaaggctatagctggcgaagtggcccccggacccttacaaaactcccaaaaagaagtggcccaggctgggttaagccaggtcatggaggtccggatgggggacggtttaagtattttacaagatgaggacccggtggacttgatcaccatctgtggcatgggggggaatttaatcacccgaattttggaccagggactagacttgggcaagttaccggcccaggccaagctaatccttcaagccaacaatggggagcctggcttaagaaaatggctagttgaccaccactacgagattgactgcgagcttttagtaaaagacaaggggattatttactccattattttagctagtaaggcccaggaagcttttaattatagccaaatcgacttggagtatggtttcttcgaccacactaagccaccccaactagccatagaaaagtggcaaaaagaatttgataagtggtcaaaaatcctggcccaggtccaacaaagcaaaggggaccaggcagaccgggtgaaagaagtcaaagaaaaggtcaagcaattggaggaattactcaaccatgaccagcattaa

SEQ ID NO: 4166 - protein, 175 aa, Alloiococcus otitidis
MAQAGLSQVMEVRMGDGLSILQDEDPVDLITICGMGGNLITRILDQGLDLGKLPAQAKLILQANNGEPGLRKWLVDHHYEIDCELLVKDKGIIYSIILASKAQEAFNYSQIDLEYGFFDHTKPPQLAIEKWQKEFDKWSKILAQVQQSKGDQADRVKEVKEKVKQLEELLNHDQH

SEQ ID NO: 4167 - DNA, 732 bp, Alloiococcus otitidis; identical to SEQ ID NO: 4165
  CDS (25)..(729)

SEQ ID NO: 4168 - protein, 235 aa, Alloiococcus otitidis
MELSNRLQVIADLVPLDTACLADIGSDHAYLPIYLIQNNRVGKAIAGEVAPGPLQNSQKEVAQAGLSQVMEVRMGDGLSILQDEDPVDLITICGMGGNLITRILDQGLDLGKLPAQAKLILQANNGEPGLRKWLVDHHYEIDCELLVKDKGIIYSIILASKAQEAFNYSQIDLEYGFFDHTKPPQLAIEKWQKEFDKWSKILAQVQQSKGDQADRVKEVKEKVKQLEELLNHDQH

SEQ ID NO: 4169 - DNA, 678 bp, Alloiococcus otitidis
  CDS (34)..(675)
tcagttattttgatgatttggaaggtgaaatgtatgaaaataagtgcacaaaaacgtacacaaactggtactagtgcctccaaaaaagcacgtcaagaaggttacctaccagctgttgtctacggttcgaaagtggattcaaccccaattttattaaaattaaaagatgtagaagatactctgagagaagttgggtcaaacggtgtctttgaaattgacttagacggggacaaactacaggtctttgttaaagatgctgtttatgaaacctttagacctcaattgcgtcacattgacttgcttgcctttacttcaggggaaaaagttgctatgtctatccctgtttatgttgaaggtgaagagtcaatcgaagtgggttatgtttcccaatctatctctgagattgaaatggaaattgcccctgctaaggccccatctgaattgactgttgatgtcaaagggatggaaattggggattccctaacggttgcagacatcgacgttcctgaagatgctgagatcttagacgaattagaagcaaccgtcttgtccatctcagcaccagatgatgtttctgatgaccttgaacaaagtgatgaaggtgaaacagaagcagatatgcctgaacctgaagtaattactgaaaaagaagatgaagaggaagactcagaagagtaa

SEQ ID NO: 4170 - protein, 214 aa, Alloiococcus otitidis
MKISAQKRTQTGTSASKKARQEGYLPAVVYGSKVDSTPILLKLKDVEDTLREVGSNGVFEIDLDGDKLQVFVKDAVYETFRPQLRHIDLLAFTSGEKVAMSIPVYVEGEESIEVGYVSQSISEIEMEIAPAKAPSELTVDVKGMEIGDSLTVADIDVPEDAEILDELEATVLSISAPDDVSDDLEQSDEGETEADMPEPEVITEKEDEEEDSEE

SEQ ID NO: 4171 - DNA, 678 bp, Alloiococcus otitidis; identical to SEQ ID NO: 4169
  CDS (13)..(675)

SEQ ID NO: 4172 - protein, 221 aa, Alloiococcus otitidis
MIWKVKCMKISAQKRTQTGTSASKKARQEGYLPAVVYGSKVDSTPILLKLKDVEDTLREVGSNGVFEIDLDGDKLQVFVKDAVYETFRPQLRHIDLLAFTSGEKVAMSIPVYVEGEESIEVGYVSQSISEIEMEIAPAKAPSELTVDVKGMEIGDSLTVADIDVPEDAEILDELEATVLSISAPDDVSDDLEQSDEGETEADMPEPEVITEKEDEEEDSEE

SEQ ID NO: 4173 - DNA, 678 bp, Alloiococcus otitidis; identical to SEQ ID NO: 4169
  CDS (10)..(675)

SEQ ID NO: 4174 - protein, 222 aa, Alloiococcus otitidis
MMIWKVKCMKISAQKRTQTGTSASKKARQEGYLPAVVYGSKVDSTPILLKLKDVEDTLREVGSNGVFEIDLDGDKLQVFVKDAVYETFRPQLRHIDLLAFTSGEKVAMSIPVYVEGEESIEVGYVSQSISEIEMEIAPAKAPSELTVDVKGMEIGDSLTVADIDVPEDAEILDELEATVLSISAPDDVSDDLEQSDEGETEADMPEPEVITEKEDEEEDSEE

SEQ ID NO: 4175 - DNA, 1113 bp, Alloiococcus otitidis
  CDS (142)..(1110)
ttagtggttgagacaaaatcaaaactagaaaatgcagtaaacaccctcattaaagacttgaaaaataaaaaagagtcgaccatttcttatattgacctcagcaacaaaattgctgaacccttcgaacttgaaagtgaagccatggacaagttaatccagcaattagaagatgatgggattggtgtagttgaccaagacggtaatcccttggccaagcaactagccaagcaggaagaagaagcagaaaaagccaaggatgaagaaatgatagccccacctggggttaaaattaacgaccctgtccggatgtacctaaaagaaattggccgggtagatcttttagatgctgaagaagaagtggccctagccaagcggattgaagaaggcgatgaaatcgctaaacaagaactagctgaggctaacttgagactggttgtctctattgctaaacggtacgttggccggggcatgagctttttggacttgatccaggaagggaatatggggctaatgaaggcagttgaaaaatttgactacgaaaaaggtttcaaattttcaacctatgccacctggtggatccgtcaagccatcactcgggccattgccgaccaagcccgaaccatccggattccggtccacatggtcgaaactattaacaagctggtccgaatccagcggcagctcctacaagaactaggccgggaaccaaccccagaagaaattggggcagagatggatttgccaaccgaaaaagtcagagatattttgaaaatttcccaagaacccgtctcccttgaaaccccaattggggaagaagaagattcccacctgggagactttattgaagatgatggggccttgtcgccatctgataatgcagcttatgagctgttgaaaggggaactcaaaggagtcttagacaccctaactgaccgggaagaaaatgtcttgcgcctccgttttggcctagatgatggccgtcaacgtactttagaagatgtcggtaaggtctttggggtcacccgggagcggatccgtcaaattgaagcgaaggccctccgcaaactccgccaccctagccggtccaaacaattaaaagactttttagaatag

SEQ ID NO: 4176 - protein, 323 aa, Alloiococcus otitidis
MDKLIQQLEDDGIGVVDQDGNPLAKQLAKQEEEAEKAKDEEMIAPPGVKINDPVRMYLKEIGRVDLLDAEEEVALAKRIEEGDEIAKQELAEANLRLVVSIAKRYVGRGMSFLDLIQEGNMGLMKAVEKFDYEKGFKFSTYATWWIRQAITRAIADQARTIRIPVHMVETINKLVRIQRQLLQELGREPTPEEIGAEMDLPTEKVRDILKISQEPVSLETPIGEEEDSHLGDFIEDDGALSPSDNAAYELLKGELKGVLDTLTDREENVLRLRFGLDDGRQRTLEDVGKVFGVTRERIRQIEAKALRKLRHPSRSKQLKDFLE

SEQ ID NO: 4177 - DNA, 1113 bp, Alloiococcus otitidis; identical to SEQ ID NO: 4175
  CDS (58)..(1110)

SEQ ID NO: 4178 - protein, 351 aa, Alloiococcus otitidis
MKNKKESTISYIDLSNKIAEPFELESEAMDKLIQQLEDDGIGVVDQDGNPLAKQLAKQEEEAEKAKDEEMIAPPGVKINDPVRMYLKEIGRVDLLDAEEEVALAKRIEEGDEIAKQELAEANLRLVVSIAKRYVGRGMSFLDLIQEGNMGLMKAVEKFDYEKGFKFSTYATWWIRQAITRAIADQARTIRIPVHMVETINKLVRIQRQLLQELGREPTPEEIGAEMDLPTEKVRDILKISQEPVSLETPIGEEEDSHLGDFIEDDGALSPSDNAAYELLKGELKGVLDTLTDREENVLRLRFGLDDGRQRTLEDVGKVFGVTRERIRQIEAKALRKLRHPSRSKQLKDFLE

SEQ ID NO: 4179 - DNA, 1113 bp, Alloiococcus otitidis; identical to SEQ ID NO: 4175
  CDS (4)..(1110)

SEQ ID NO: 4180 - protein, 369 aa, Alloiococcus otitidis
MVETKSKLENAVNTLIKDLKNKKESTISYIDLSNKIAEPFELESEAMDKLIQQLEDDGIGVVDQDGNPLAKQLAKQEEEAEKAKDEEMIAPPGVKINDPVRMYLKEIGRVDLLDAEEEVALAKRIEEGDEIAKQELAEANLRLVVSIAKRYVGRGMSFLDLIQEGNMGLMKAVEKFDYEKGFKFSTYATWWIRQAITRAIADQARTIRIPVHMVETINKLVRIQRQLLQELGREPTPEEIGAEMDLPTEKVRDILKISQEPVSLETPIGEEEDSHLGDFIEDDGALSPSDNAAYELLKGELKGVLDTLTDREENVLRLRFGLDDGRQRTLEDVGKVFGVTRERIRQIEAKALRKLRHPSRSKQLKDFLE

SEQ ID NO: 4181 - DNA, 447 bp, Alloiococcus otitidis
  CDS (64)..(444)
tcaaatttttcaactgccttcattagccccatattcccttcctggatcaagtccaaaaagctcatgccccggccaacgtaccgtttagcaatagagacaaccagtctcaagttagcctcagctagttcttgtttagcgatttcatcgccttcttcaatccgcttggctagggccacttcttcttcagcatctaaaagatctacccggccaatttcttttaggtacatccggacagggtcgttaattttaaccccaggtggggctatcatttcttcatccttggctttttctgcttcttcttcctgcttggctagttgcttggccaagggattaccgtcttggtcaactacaccaatcccatcatcttctaattgctggattaacttgtccatggcttcactttcaagttcgaagggttcagcaattttgttgctgaggtcaatataa

SEQ ID NO: 4182 - protein, 127 aa, Alloiococcus otitidis
MPRPTYRLAIETTSLKLASASSCLAISSPSSIRLARATSSSASKRSTRPISFRYIRTGSLILTPGGAIISSSLAFSASSSCLASCLAKGLPSWSTTPIPSSSNCWINLSMASLSSSKGSAILLLRSI

SEQ ID NO: 4183 - DNA, 1854 bp, Alloiococcus otitidis
  CDS (262)..(1851)
atggttagaatacctgaagagaccattaatcaaatacgaagccaggcagatattgtcgatgtcattggccaatacttggacttaaacaagtctggggccaattactttgcccactgccccttccatgaagacagcacgccttctttttcggtcaacagagacaagcaaatttataagtgcttttcttgcaaacgaggtggcagtgtctttagctttatacaagagaaggagggactttccttcccagaatcggttcttaaagtggcagacttagctaatgtggaccttgatccggccttaaaagaagctgtccaaggccaacctgacaaagccgattctccctaccgagacctctataccatccatgaccaggccaaggactactaccagtatatcctcttaaaggcccaggtgggagaagttgcttacgactatctccagaatcgtgggatttccagagaggtgatggaagagttcgaactgggttattctcccagccaaagggagtcgctccacctttatttgcagtcccaagaccaggcggacttgacagatgacttactggaagaaaccggccttttttccaaaagagaagtggaaagtgatagttttaaagaccgctttgccaagcggatcatcttccccttaaagaacttacaagggcagacggtgggcttttcgggccggtatttccaagatgagcctaaccaggacttccatcatgccaagtatttaaacagtccagaaaccaaaatattcaataaacggcggaccctctttaactaccaccaggccaaggcctacattcgtcgggccaaggaagttgtcttattcgaaggttacatggatgtgattgctgcttggcaagcgggggtcaaaaatggcttagcttccatggggaccagtataacagctgaccaagtccagaccatgcaaaggattgctgacaccttagtcttggcctttgacggggatgaagctggccttgaatccagcaaaaagatcctggatgacttaagcttgaccagcaagcttcaaattgaagtggtcattttccctaaaaaaatggacccggatgaatatattagagaaaatggaccagaagcctttcaaaatctcatccaacatggtaggatgactgtctaccaattcttaaaagaatactttaaaaaatcctacaatctagataacgactcggaccggttgaaatttatccaaaccatgaccaataaaattggcaagctagcttcccccttggaaagggaagtctatgccaaggatttggcagaagaatttaacctgtcttatgatacgattataagccaagttcaaagtgaagccactctaaaccagcaagaggctttgaaaaaggaccggcataaggaattttctcaagcaagagtggaagtcaaagccccaagtagtcaaaagactaagattgaccgggcccaggaaaaacttttaaaccgactcttttactatccccaagttcaagagatcatcgatgcttataatccggactttgaatttaaaacggaagtccaccagcggatttacctcttgtttttagaatacagccaggaaaatgatagcattgattctttcatcgattttgtcaaagacaaggagacgaaagaggtcatatctgatataatgtggacatccattgaggtcgaaccctcagatgaagaaatcctagactacttggactacattgaccaaacctaccccctggagcaaaaacgccaagactgcttggaggaagtcaaagcagctaaacagtccggtaataagaagcgagagctggaattaaccaatcaattaattgaaataaaccgtatgctaaaacaataa

SEQ ID NO: 4184 - protein, 530 aa, Alloiococcus otitidis
MADLANVDLDPALKEAVQGQPDKADSPYRDLYTIHDQAKDYYQYILLKAQVGEVAYDYLQNRGISREVMEEFELGYSPSQRESLHLYLQSQDQADLTDDLLEETGLFSKREVESDSFKDRFAKRIIFPLKNLQGQTVGFSGRYFQDEPNQDFHHAKYLNSPETKIFNKRRTLFNYHQAKAYIRRAKEVVLFEGYMDVIAAWQAGVKNGLASMGTSITADQVQTMQRIADTLVLAFDGDEAGLESSKKILDDLSLTSKLQIEVVIFPKKMDPDEYIRENGPEAFQNLIQHGRMTVYQFLKEYFKKSYNLDNDSDRLKFIQTMTNKIGKLASPLEREVYAKDLAEEFNLSYDTIISQVQSEATLNQQEALKKDRHKEFSQARVEVKAPSSQKTKIDRAQEKLLNRLFYYPQVQEIIDAYNPDFEFKTEVHQRIYLLFLEYSQENDSIDSFIDFVKDKETKEVISDIMWTSIEVEPSDEEILDYLDYIDQTYPLEQKRQDCLEEVKAAKQSGNKKRELELTNQLIEINRMLKQ

SEQ ID NO: 4185 - DNA, 1854 bp, Alloiococcus otitidis; identical to SEQ ID NO: 4183
  CDS (1)..(1851)

SEQ ID NO: 4186 - protein, 617 aa, Alloiococcus otitidis
MVRIPEETINQIRSQADIVDVIGQYLDLNKSGANYFAHCPFHEDSTPSFSVNRDKQIYKCFSCKRGGSVFSFIQEKEGLSFPESVLKVADLANVDLDPALKEAVQGQPDKADSPYRDLYTIHDQAKDYYQYILLKAQVGEVAYDYLQNRGISREVMEEFELGYSPSQRESLHLYLQSQDQADLTDDLLEETGLFSKREVESDSFKDRFAKRIIFPLKNLQGQTVGFSGRYFQDEPNQDFHHAKYLNSPETKIFNKRRTLFNYHQAKAYIRRAKEVVLFEGYMDVIAAWQAGVKNGLASMGTSITADQVQTMQRIADTLVLAFDGDEAGLESSKKILDDLSLTSKLQIEVVIFPKKMDPDEYIRENGPEAFQNLIQHGRMTVYQFLKEYFKKSYNLDNDSDRLKFIQTMTNKIGKLASPLEREVYAKDLAEEFNLSYDTIISQVQSEATLNQQEALKKDRHKEFSQARVEVKAPSSQKTKIDRAQEKLLNRLFYYPQVQEIIDAYNPDFEFKTEVHQRIYLLFLEYSQENDSIDSFIDFVKDKETKEVISDIMWTSIEVEPSDEEILDYLDYIDQTYPLEQKRQDCLEEVKAAKQSGNKKRELELTNQLIEINRMLKQ

SEQ ID NO: 4187 - DNA, 3300 bp, Alloiococcus otitidis
  CDS (289)..(3297)
ggactgaagcgagtgtttaaaaaacagttttttcctgaggcaactctaagatctttggcaaccaactcgactgtctatgaccggggcgtcagactctttgaagaaggtcgagtggaatcttgtgaactcgatgaggacaaccacttagctatatcagatgtaaatggcaaccaagacgattacactacccagatcagttttttaaaaaatggggtagccagacgttaccactgtacctgtccagcctttgaacaatatgctggtgcttgcaagcatgtcattgccagtatgttgaatttaaaccaaatcgatctttcagaccaagaccagccggccaaagaagacccaagagcaggtaagaaaagtcagctcgattcctacttagctgacctggaggaagattttcaaaaactacaaattaataagtattcctctagaagtcgtaaccggctcttttttgactttatcctcaatgtcagtccctattattatgagaatgcctttgaaatttatatgaaggtggggattgaccatatgtacgttattaaaaatgtgccagacttggtccatacccttctcaataacgatgactatgtttttggtaaaaacttaacctaccactataaagaccacttcattgccccagaagaccgggctgttttgcaggaattagccgatatccatgccaatatggaacaagttaaagcttctagctaccagtcgctcacaaataaaaatgaattgatgatacctaaccaaatggtgggtcggctcttgcgtcgactgagacaggttgaccatgcttctgcccactttggcagttcaccgacttccatcactgctatcagagacttggagcccatacaatattctaacagcctagctgatttcccgcttgacttcagtttgacaagggaagggagccattactatttcaatatggacggtatcaagatgaatacccaacccatttccttctttcctgaaagtcgcttggtggtttatgaccacgtcttttatgacctgtcacaggaagattaccaagttctctatagtttggttaaattcttccatggcttgcacaccaatgaaattcccatgaagcaagatgacttaagccacttcatgtccacgatttatcctactcttagccggtactttgacctagcacttgatcctgatattgaaaaaaccatctaccaaaaagaactaactgctgccttgtatatcgattataaaaataaggtcctaagcttagaaccccgttttaactacggccaagtgaccgtcaaccccatagtaaaccagactgaccaggctggggagggacaagtcttaatccgagatacggtagaagaagccagcctccttgacttgctttaccaggtcttggacggcttagaagaagaagaggaccattttgctatcagtgacttccaagcagttagtaaggccatatatgacggtatgggccagctctttgagtcctttgacctctatttaaccgatgctgtccgcaagctttactaccaaagacccaaccataagccggtttccatcgatgtggactatgatgccaacctcctccaagttgattttgaaatggaagacatggctagcgatgatattaaacaaattcttacccagttgaaggcaggcaatgaccgtttttacaagttgtcgtctggtgctattttagacttggagcgagatgagtttaaagaattgaaggaagtggcagacgacttatcgcttgacccggaccaagatgacatctcaaactcctttaatatccccctctaccaaggcttgtcgctacttgaaaacaataatgtcgacaaaagtgaccagtttatgagcctggccaagtcccttctggaacccaaatcaatttcctatgaggtcccagaccaagtccaggctgatttaagaccctatcaaaagactggctacaactggctgaaggccttggatgcctacaaatttggtggggttttagctgacgacatgggcttgggtaaaaccctgcagtccattacttttatccagtccaagctaaacgagttagggggcaagtatctgattgtctgcccatccagtgtcttatacaactggcagtacgagttcaaccagttcacaccggaaattcaaccaactgttattgccgggacggcccaagaacgggaagaggtcatcgaccaggtcaaagacaagaaaaatggtgtttggatctcatcctaccccttgattcaacgagacagtgacttttaccagggtatccactttgaaaccatcatcctggatgaatcccaagcggtgaaaaatgattcggccaagacaacccgggctgtcgcccgcctgcaggctaagaacaagttcgccttgtcgggaaccccaattgaaaacaatttaaatgaactctggaccctcttttccattatccaaccgggcatgttccaagataagaagaactttaagcagatggaccagtccgtcatcgctaaaaagatcaagccctttatcctccgccggctcaaaggtcaggtcttagatgacttgcctgaaaaaacggagacaacagaatatatcgaactcagcaaaaagcaaaaacaaatttaccagacccaacaggccatgatccagtcccaggtccaagaactgttggataacaatgaatttgaacgcaatagtgttcaagtcctggctggtatgacaagattgcggcagatctgttgtgaccctaacctggtgactaagcaatatgatggagattcagccaagctcgaccgcttgatggaatacctagctgaagctaagcaaaatggcaagcgaatcgtcctcttttcccaatttaccaagatgttagatataatcagggaccggcttgctgaaaatgactatgactacttttacctggatggccaaaccaagaaagaagaccggctcgacctcacccatcgctttaataaaggagagaaggacctcttccttatttccctgaaagcaggggggaccgggatcaacttgacgggaggcgacacagttatcctctatgactcgtggtggaatccggccattgaagaccaggcagctgaccgggtccaccgctttggtcagaaaaaacacgtccaagtcttgcgtttaattgcccgaggaaccatcgaagagcggatcaacgaactccaagaaaagaaaagggacttggtagactccgtcatcgattccaaaggcaaccaggccattaccagtctctccaaagatgaaatcttgcaacttttagatgtttctgcatctgtgtaa

SEQ ID NO: 4188 - protein, 1003 aa, Alloiococcus otitidis
MLNLNQIDLSDQDQPAKEDPRAGKKSQLDSYLADLEEDFQKLQINKYSSRSRNRLFFDFILNVSPYYYENAFEIYMKVGIDHMYVIKNVPDLVHTLLNNDDYVFGKNLTYHYKDHFIAPEDRAVLQELADIHANMEQVKASSYQSLTNKNELMIPNQMVGRLLRRLRQVDHASAHFGSSPTSITAIRDLEPIQYSNSLADFPLDFSLTREGSHYYFNMDGIKMNTQPISFFPESRLVVYDHVFYDLSQEDYQVLYSLVKFFHGLHTNEIPMKQDDLSHFMSTIYPTLSRYFDLALDPDIEKTIYQKELTAALYIDYKNKVLSLEPRFNYGQVTVNPIVNQTDQAGEGQVLIRDTVEEASLLDLLYQVLDGLEEEEDHFAISDFQAVSKAIYDGMGQLFESFDLYLTDAVRKLYYQRPNHKPVSIDVDYDANLLQVDFEMEDMASDDIKQILTQLKAGNDRFYKLSSGAILDLERDEFKELKEVADDLSLDPDQDDISNSFNIPLYQGLSLLENNNVDKSDQFMSLAKSLLEPKSISYEVPDQVQADLRPYQKTGYNWLKALDAYKFGGVLADDMGLGKTLQSITFIQSKLNELGGKYLIVCPSSVLYNWQYEFNQFTPEIQPTVIAGTAQEREEVIDQVKDKKNGVWISSYPLIQRDSDFYQGIHFETIILDESQAVKNDSAKTTRAVARLQAKNKFALSGTPIENNLNELWTLFSIIQPGMFQDKKNFKQMDQSVIAKKIKPFILRRLKGQVLDDLPEKTETTEYIELSKKQKQIYQTQQAMIQSQVQELLDNNEFERNSVQVLAGMTRLRQICCDPNLVTKQYDGDSAKLDRLMEYLAEAKQNGKRIVLFSQFTKMLDIIRDRLAENDYDYFYLDGQTKKEDRLDLTHRFNKGEKDLFLISLKAGGTGINLTGGDTVILYDSWWNPAIEDQAADRVHRFGQKKHVQVLRLIARGTIEERINELQEKKRDLVDSVIDSKGNQAITSLSKDEILQLLDVSASV

SEQ ID NO: 4189 - DNA, 3300 bp, Alloiococcus otitidis; identical to SEQ ID NO: 4187
  CDS (55)..(3297)

SEQ ID NO: 4190 - protein, 1081 aa, Alloiococcus otitidis
MATNSTVYDRGVRLFEEGRVESCELDEDNHLAISDVNGNQDDYTTQISFLKNGVARRYHCTCPAFEQYAGACKHVIASMLNLNQIDLSDQDQPAKEDPRAGKKSQLDSYLADLEEDFQKLQINKYSSRSRNRLFFDFILNVSPYYYENAFEIYMKVGIDHMYVIKNVPDLVHTLLNNDDYVFGKNLTYHYKDHFIAPEDRAVLQELADIHANMEQVKASSYQSLTNKNELMIPNQMVGRLLRRLRQVDHASAHFGSSPTSITAIRDLEPIQYSNSLADFPLDFSLTREGSHYYFNMDGIKMNTQPISFFPESRLVVYDHVFYDLSQEDYQVLYSLVKFFHGLHTNEIPMKQDDLSHFMSTIYPTLSRYFDLALDPDIEKTIYQKELTAALYIDYKNKVLSLEPRFNYGQVTVNPIVNQTDQAGEGQVLIRDTVEEASLLDLLYQVLDGLEEEEDHFAISDFQAVSKAIYDGMGQLFESFDLYLTDAVRKLYYQRPNHKPVSIDVDYDANLLQVDFEMEDMASDDIKQILTQLKAGNDRFYKLSSGAILDLERDEFKELKEVADDLSLDPDQDDISNSFNIPLYQGLSLLENNNVDKSDQFMSLAKSLLEPKSISYEVPDQVQADLRPYQKTGYNWLKALDAYKFGGVLADDMGLGKTLQSITFIQSKLNELGGKYLIVCPSSVLYNWQYEFNQFTPEIQPTVIAGTAQEREEVIDQVKDKKNGVWISSYPLIQRDSDFYQGIHFETIILDESQAVKNDSAKTTRAVARLQAKNKFALSGTPIENNLNELWTLFSIIQPGMFQDKKNFKQMDQSVIAKKIKPFILRRLKGQVLDDLPEKTETTEYIELSKKQKQIYQTQQAMIQSQVQELLDNNEFERNSVQVLAGMTRLRQICCDPNLVTKQYDGDSAKLDRLMEYLAEAKQNGKRIVLFSQFTKMLDIIRDRLAENDYDYFYLDGQTKKEDRLDLTHRFNKGEKDLFLISLKAGGTGINLTGGDTVILYDSWWNPAIEDQAADRVHRFGQKKHVQVLRLIARGTIEERINELQEKKRDLVDSVIDSKGNQAITSLSKDEILQLLDVSASV

SEQ ID NO: 4191 - DNA, 3300 bp, Alloiococcus otitidis; identical to SEQ ID NO: 4187
  CDS (13)..(3297)

SEQ ID NO: 4192 - protein, 1095 aa, Alloiococcus otitidis
MFKKQFFPEATLRSLATNSTVYDRGVRLFEEGRVESCELDEDNHLAISDVNGNQDDYTTQISFLKNGVARRYHCTCPAFEQYAGACKHVIASMLNLNQIDLSDQDQPAKEDPRAGKKSQLDSYLADLEEDFQKLQINKYSSRSRNRLFFDFILNVSPYYYENAFEIYMKVGIDHMYVIKNVPDLVHTLLNNDDYVFGKNLTYHYKDHFIAPEDRAVLQELADIHANMEQVKASSYQSLTNKNELMIPNQMVGRLLRRLRQVDHASAHFGSSPTSITAIRDLEPIQYSNSLADFPLDFSLTREGSHYYFNMDGIKMNTQPISFFPESRLVVYDHVFYDLSQEDYQVLYSLVKFFHGLHTNEIPMKQDDLSHFMSTIYPTLSRYFDLALDPDIEKTIYQKELTAALYIDYKNKVLSLEPRFNYGQVTVNPIVNQTDQAGEGQVLIRDTVEEASLLDLLYQVLDGLEEEEDHFAISDFQAVSKAIYDGMGQLFESFDLYLTDAVRKLYYQRPNHKPVSIDVDYDANLLQVDFEMEDMASDDIKQILTQLKAGNDRFYKLSSGAILDLERDEFKELKEVADDLSLDPDQDDISNSFNIPLYQGLSLLENNNVDKSDQFMSLAKSLLEPKSISYEVPDQVQADLRPYQKTGYNWLKALDAYKFGGVLADDMGLGKTLQSITFIQSKLNELGGKYLIVCPSSVLYNWQYEFNQFTPEIQPTVIAGTAQEREEVIDQVKDKKNGVWISSYPLIQRDSDFYQGIHFETIILDESQAVKNDSAKTTRAVARLQAKNKFALSGTPIENNLNELWTLFSIIQPGMFQDKKNFKQMDQSVIAKKIKPFILRRLKGQVLDDLPEKTETTEYIELSKKQKQIYQTQQAMIQSQVQELLDNNEFERNSVQVLAGMTRLRQICCDPNLVTKQYDGDSAKLDRLMEYLAEAKQNGKRIVLFSQFTKMLDIIRDRLAENDYDYFYLDGQTKKEDRLDLTHRFNKGEKDLFLISLKAGGTGINLTGGDTVILYDSWWNPAIEDQAADRVHRFGQKKHVQVLRLIARGTIEERINELQEKKRDLVDSVIDSKGNQAITSLSKDEILQLLDVSASV

SEQ ID NO: 4193 - DNA, 2085 bp, Alloiococcus otitidis
  CDS (7)..(2082)
acaagtatgaaggaaggtttgaataagatgagtcaccagtttttatatgaaattggcctagaagagttgccagcccgtttcatcactgacttagaagcccaattaaagaatttggtcagtcaatttttaaatgaccaaggcttggcttacagcaaaatcaagtcctattccactcccagaaggctagcagttcaagtttgggatttagctgacagccaagaggacaaaacagaaagcttcagaggaccggccaagaagattgccctagaccaagacggccagtggaccaaggctgcccttggttttgctaaggggcaggggatgagtgccgacgatattgtctttaaagaagacaagggccaagactatgcctttattgaaaaattccgaccaggtcaaaaggctgaccaggtcttagaagatatttctcaagtagtttcaggattgacggcccctgtcagcatgaagtggggcgataaccacttccgctttgtcagacccgtccaccagctagtctgtcttttagacgaccaggttatcgacagctccttatttaacgtgtccagcggccggaagactgatggccaccgttttctaggggaaactcttgagctggcttcagccgagaactatgaaaaagccttaaagaaccaatatgttatcgccgacagacaggatcggcaagaagatattgctagacaaattgaagccttgtgccaagacaaaaactggcaaagtcccctctacaaccaggccctcttggatgaagtcacagacctggttgaatacccaaccgtctttttcggggaatttgactcctccttcttaagtgtaccggagcggattttagagacttccatggctgaccaccagcgttacttccctgtccggtccaaattaggcgacttccttccctactttatcggggtccggaatgggaatgaggctggtttagaaaatgttgttgccggcaatgaaaaagttttagtggcccggttagaagatgccaagtttttctaccaggaggataaggaccactccattgactacttcctaaaccagctagaccaggtcacctaccacgacaagttggggtctatgcaggataaacaggaccgggtaggtcagatttgcttggacctcctagactatgtctccttgacccaagctgaaagagatgacctcagccgggcagcagccatctataaatttgacctggttaccgctgtggtcgatgaattttcttcccttcaaggctatatcggcggggtctatgcccaagaatttggcgagtctcaggcggttgcccaggccattggggaacagtatttgccaaccagttcaaggggcgacttgccagagtccaagctcggttccatcttggccatggccgacaagttggaatccctcttgatgttctttagcattaacttaattccaagtgggtcaaatgacccttacgctctaagacgggcagcatacggtttgatccggatcttggatgaccaggacttatcacttgatttaacggactttttctaccagctggcccaagaccttgggatagaagacactcactttatcgaaaagcttgaccagtttatcaaggagcgggttgataagtatcttgaagcccaataccaaatcccccacgatattcgtcaggctgccattagtggcctccacttaaacccagtcaaggccattaaggtcgggcaaaaactggcagaagaccggggaagccaagactataaatttatggtggaatccctgtcccgggtagccaatatgacgcagcaagaaaccagccatgcagaagttgaccctgacctggcccaaagccagtcagaagaagacttaatcaaggcttccgtcttcctcttgggcttgttccaagaatcagatgatatcactgcccagtatgaagccctcaaggagatcagtccgaaaatcgaagccttttttgacaacaatatggttaacactgaagacgaccaggtccgggctaaccgctatgcgatcttggatcagatcacccaagcttcgcacagctttgccgactttaaccaattattgaccaagtaa

SEQ ID NO: 4194 - protein, 692 aa, Alloiococcus otitidis
MKEGLNKMSHQFLYEIGLEELPARFITDLEAQLKNLVSQFLNDQGLAYSKIKSYSTPRRLAVQVWDLADSQEDKTESFRGPAKKIALDQDGQWTKAALGFAKGQGMSADDIVFKEDKGQDYAFIEKFRPGQKADQVLEDISQVVSGLTAPVSMKWGDNHFRFVRPVHQLVCLLDDQVIDSSLFNVSSGRKTDGHRFLGETLELASAENYEKALKNQYVIADRQDRQEDIARQIEALCQDKNWQSPLYNQALLDEVTDLVEYPTVFFGEFDSSFLSVPERILETSMADHQRYFPVRSKLGDFLPYFIGVRNGNEAGLENVVAGNEKVLVARLEDAKFFYQEDKDHSIDYFLNQLDQVTYHDKLGSMQDKQDRVGQICLDLLDYVSLTQAERDDLSRAAAIYKFDLVTAVVDEFSSLQGYIGGVYAQEFGESQAVAQAIGEQYLPTSSRGDLPESKLGSILAMADKLESLLMFFSINLIPSGSNDPYALRRAAYGLIRILDDQDLSLDLTDFFYQLAQDLGIEDTHFIEKLDQFIKERVDKYLEAQYQIPHDIRQAAISGLHLNPVKAIKVGQKLAEDRGSQDYKFMVESLSRVANMTQQETSHAEVDPDLAQSQSEEDLIKASVFLLGLFQESDDITAQYEALKEISPKIEAFFDNNMVNTEDDQVRANRYAILDQITQASHSFADFNQLLTK

SEQ ID NO: 4195 - DNA, 1011 bp, Alloiococcus otitidis
  CDS (79)..(1008)
ggtggaaccgcgaataatcgtccctatactgactccaagagttggtataggggcttttttattagaaaggataggattatggagcagacaaaagctttatccttacagggaattattttatcactgcagaattattggtctgatcaaggttgcattattttaaatgcctatgataccgaaaaaggggcagggaccatgagtccttacacttttttacggagtaatggaccggagccatggaatgccgcttatgtggagccttccagaaggcccgatgatggacgttacgggcaaaaccccaaccgtctcttccaacaccaccaattccaggtggtcatgaaaccgtctcctagcaatatccaagacctctacctaaaaagtttagaagctctggggattgaccccttggcccatgacatccgctttgtagaagacaactgggaaaacccttccctaggctgtgctggtttgggctgggaagtttggctggatggcatggaagtcacccaatttacctacttccagcaagttggggggatggaagtggaccgggtgactgtcgaattgacttatggcctggagcgcctggcttcttatatccaggaagtggccagcgtctatgacctggaatggacccagggcgttttatacggggatatttttaaacaggctgaatttgaacactcaacctattcctttgaccagtcagacccccaagtcttgatccaggaattcaaggttaatgagaaccaggccctccgcttaattgatgctggcctagtccaccccgcatacgactatgtcttaaaggctagccacactttcaaccttttggatgccagaggggtggtatcagccattgagcgggctgactacctgaaacgaattcggaatatggctcggagcatcgccaaacaatttgtggccgaacgctacaagctctcttttcctttaatagaagatgacaagcgacaagagtggttagacaagtatgaaggaaggtttgaataa

SEQ ID NO: 4196 - protein, 310 aa, Alloiococcus otitidis
MEQTKALSLQGIILSLQNYWSDQGCIILNAYDTEKGAGTMSPYTFLRSNGPEPWNAAYVEPSRRPDDGRYGQNPNRLFQHHQFQVVMKPSPSNIQDLYLKSLEALGIDPLAHDIRFVEDNWENPSLGCAGLGWEVWLDGMEVTQFTYFQQVGGMEVDRVTVELTYGLERLASYIQEVASVYDLEWTQGVLYGDIFKQAEFEHSTYSFDQSDPQVLIQEFKVNENQALRLIDAGLVHPAYDYVLKASHTFNLLDARGVVSAIERADYLKRIRNMARSIAKQFVAERYKLSFPLIEDDKRQEWLDKYEGRFE

SEQ ID NO: 4197 - DNA, 792 bp, Alloiococcus otitidis
  CDS (22)..(789)
agacaactattaggggattttatggcagaattaaaagaagtccaggcgcttgtcttatccaagcgcaagtacaaggaaagagactacctggttaaaatcttcttaaaccattacggcaagatgatgttttacgttcgggggtccaaaaaccccaaccggtccatggctagcctgatccaaccttttacagccgggcgctacattgttgatattagaaagacaggactgtcttttatccgggatgccaagtctgttcaagcttttagcttaatccaacaagatatttttaaaaatgcttatgccacctatatttgtggtttggtggatgcctgtatgggagaccggcaaccagcagacggtctcttccgccagctttactacggcttaagtaagatcgaagctgacatagacccagaagtcattatgtttatctttgaaatcaaacttctctactattttggggtaatgcctgactttttcacttgtcaagtatgtggcaaaagccaaggcccctttgattattctggggcctatgctggcctgctttgtccaaaccacctggaccaagatgcccacaggttgcaactccaccctaaaaccatctaccatgtccaaaactttttgcaagtcaacttaaaaaatattgaaagcatcacaattgccccagagattaaggcctcattggagaaattgactgacaccatctatgaggacttggttggagtccgcttaaagagcaaaaaatttatcaagcagatgaaaaaatgggggtcaatgctagatggtgattga

SEQ ID NO: 4198 - protein, 256 aa, Alloiococcus otitidis
MAELKEVQALVLSKRKYKERDYLVKIFLNHYGKMMFYVRGSKNPNRSMASLIQPFTAGRYIVDIRKTGLSFIRDAKSVQAFSLIQQDIFKNAYATYICGLVDACMGDRQPADGLFRQLYYGLSKIEADIDPEVIMFIFEIKLLYYFGVMPDFFTCQVCGKSQGPFDYSGAYAGLLCPNHLDQDAHRLQLHPKTIYHVQNFLQVNLKNIESITIAPEIKASLEKLTDTIYEDLVGVRLKSKKFIKQMKKWGSMLDGD

SEQ ID NO: 4199 - DNA, 987 bp, Alloiococcus otitidis
  CDS (55)..(984)
gccagacaatcggacaactattaccggacaactttaagccaggggacatggaatatggaaaacaatgaaaacaatgaaaacaaagatagcaaaacatttaaatcaggttttgtcacccttcttggccggcccaatgtgggcaagtcaaccctgctcaaccaaatattaggccagaagattaccattatcagtgacaaaccccaaacaacccggaataaaatccagggtatttacaccgaccaagcggggcaaattgtctttatcgacacacctggtatacataaacccaagcaccgcctgggccggtttatggtggattcggctatgtcgaccatcaatgaggtggacctggtcttatttgtggtcaatgtcagggaaaagattggcccgggggaccggttcattatcgacaagttgcgaaccatcgatacgccagtttttttaattattaaccagattgaccaggtcgatccaacagacctcctaccggttattagcgactaccaagaggaattcgactttgccgaagtggttccaacttcaggcttggaaggggaaaatatccaggagctcattcaaaccatcaagtcttacctacctgttggaccccaattttacccggacgaccaggtctcggaccaccccgaatactttattatttcagaactcatccgggagaaggttttagacttggctagagaagagattcctcattcagtagcagtagtaactgagaaggtagaccgaaaccaagatggtaaagtccaaacctatgccaccattattgtcgaacgcaagagccaaaaggggattattatcggcaagcaagggtccatgattaaaaaaattggtagcctagctcggcgagatattgagaaactactgggagataagatttacttggaactctgggttaaagtccaaagagactggcgggacaagcccagtcgcttagaagactttggctacaatgaagacaactattag

SEQ ID NO: 4200 - protein, 310 aa, Alloiococcus otitidis
MENNENNENKDSKTFKSGFVTLLGRPNVGKSTLLNQILGQKITIISDKPQTTRNKIQGIYTDQAGQIVFIDTPGIHKPKHRLGRFMVDSAMSTINEVDLVLFVVNVREKIGPGDRFIIDKLRTIDTPVFLIINQIDQVDPTDLLPVISDYQEEFDFAEVVPTSGLEGENIQELIQTIKSYLPVGPQFYPDDQVSDHPEYFIISELIREKVLDLAREEIPHSVAVVTEKVDRNQDGKVQTYATIIVERKSQKGIIIGKQGSMIKKIGSLARRDIEKLLGDKIYLELWVKVQRDWRDKPSRLEDFGYNEDNY

SEQ ID NO: 4201 - DNA, 426 bp, Alloiococcus otitidis
  CDS (7)..(423)
cccattatgatagatggagacaaagtaaaagaaatgattaaacaggcaactgtcatgttggaccaggcctatgtaccttactctcattttccagttggagcagccattttgacccgagagggaaagatttttgctggatgcaatattgaaaatgcctcctatggcctcagcaactgtgctgaacgaacggctatctttaaggctatctccagtggctaccgccaatttgactacttggtcgtcattggccaaaccgaccagcccattacaccttgcggggcttgtcgccaggtgatgagcgaattttgccagtcggatatgcctgttttaatggtcaacagcaagggcgattgggtaagccagacaatcggacaactattaccggacaactttaagccaggggacatggaatatggaaaacaatga

SEQ ID NO: 4202 - protein, 139 aa, Alloiococcus otitidis
MIDGDKVKEMIKQATVMLDQAYVPYSHFPVGAAILTREGKIFAGCNIENASYGLSNCAERTAIFKAISSGYRQFDYLVVIGQTDQPITPCGACRQVMSEFCQSDMPVLMVNSKGDWVSQTIGQLLPDNFKPGDMEYGKQ

SEQ ID NO: 4203 - DNA, 396 bp, Alloiococcus otitidis
  CDS (19)..(393)
atttggggttgggcgctaatggccggaccgaataagaacaatagttttcgccagtcatttaactatgcctggcagggcttagtcacagcctttaaggaggagcgaaactttcgcttccatctcttggctagtttagtggtttttatcctagcttttcttttctctttttcagggcctgaatttttgtggttgggccttgcctgttttagcgtgatctcggctgagacgaccaacaccattgttgagaatatcgtggacttggtcatgcccaactaccatccccaggccaaaaagatcaaggatttggcagcaggtttggctctgcttgcagcaggttttgccgtttttattggcctctttctctttttacccaagttgatcgccctagttttttaa

SEQ ID NO: 4204 - protein, 125 aa, Alloiococcus otitidis
MAGPNKNNSFRQSFNYAWQGLVTAFKEERNFRFHLLASLVVFILAFLFSFSGPEFLWLGLACFSVISAETTNTIVENIVDLVMPNYHPQAKKIKDLAAGLALLAAGFAVFIGLFLFLPKLIALVF

SEQ ID NO: 4205 - DNA, 498 bp, Alloiococcus otitidis
  CDS (4)..(495)
gaaatggagattgaaattatcgataaaaacgatgccctatcctcaaattttcgagacttggttcatgatttgctggttttttcggcccagtatcttaacttaagtgaccaggttgaggtgtcggttaccatcgtagataatgaggagattcggcaaattaaccgggactaccggggcaaggactatgcgactgacgttatctcctttgccatgcgggatgttatcgaagacgaccccttatgccaaatggatatggcccctttacaagcctttgaccttatgttgggggatttaattatttccatagacaaggttaagtctcaagccaaggagtacggtcactcccaaagaagagaattggccttcttggtcgtccatggcttcttacacttgaatggctatgaccaccacagccaggctgaagaagagaaatgtttcaactccaagaaaacatcttggctgaatttggggttgggcgctaatggccggaccgaataa

SEQ ID NO: 4206 - protein, 164 aa, Alloiococcus otitidis
MEIEIIDKNDALSSNFRDLVHDLLVFSAQYLNLSDQVEVSVTIVDNEEIRQINRDYRGKDYATDVISFAMRDVIEDDPLCQMDMAPLQAFDLMLGDLIISIDKVKSQAKEYGHSQRRELAFLVVHGFLHLNGYDHHSQAEEEKCFNSKKTSWLNLGLGANGRTE

SEQ ID NO: 4207 - DNA, 1092 bp, Alloiococcus otitidis
  CDS (226)..(1089)
ttttcctttttatcaccaccaaaatggcaaggcccccttttgtatgctattataggggggaatattgataaaaggagcgaatcatttttgacagaccaaacatatcaatcggtaaggacatttgaggatcccgaggcggctatcgccatctttggatcccaaaatagctacctagccttggtggaagaagagctggacattaccctctccactaggggtaataagatgatcctcaagggtgaggaagaccgggtcaccttggcaggtgagatcatttcccaattggaatttttgtatgaaaagaacagtcaaattaccgagtccgatgtcctaagcgcaattcgtttggctaaaagtgggcagattaaccaattcattaaaatgtacgaaaatattattggtcgagacgtagacggcaagcctatccgggtgagaaatgttggccaacagcggtatgtagatacggtgagtcgcaacgacattgtctttggcctgggacctgccggaactgggaagacttttttggctgtcgccttggcagtcgaagccctcagacgtaaccaggttaagcgaatcatcttaacccgtccagcagtagaagccggagaaagcctgggttttttgccaggggacttgaaagaaaaggtcgacccctacctcagacccttgtatgatgccctttttgctatctttggggtgagccataccaatcgcttgatggaaagggaaaccattgaaattgcccccctagcttatatgcggggccgaaccctggatgatgcctttgtgatcttagatgaagctcaaaataccaccattccccagatgaaaatgttcttaacccggctgggttttgggtccaagatgattatcaacggggatgtcagccagatcgacttgccgagaggagtaacttcaggtttggttcacgcggataaaatactcaagcagacacagggtattggccacgttaaatttgaaacagctgatgtggttagacaccaattggttactcgggttattgaagcttatgaccgccataaaaaaggtcaagtaaccgatgaagaaagccaggagaaagaagaggactag

SEQ ID NO: 4208 - protein, 288 aa, Alloiococcus otitidis
MILKGEEDRVTLAGEIISQLEFLYEKNSQITESDVLSAIRLAKSGQINQFIKMYENIIGRDVDGKPIRVRNVGQQRYVDTVSRNDIVFGLGPAGTGKTFLAVALAVEALRRNQVKRIILTRPAVEAGESLGFLPGDLKEKVDPYLRPLYDALFAIFGVSHTNRLMERETIEIAPLAYMRGRTLDDAFVILDEAQNTTIPQMKMFLTRLGFGSKMIINGDVSQIDLPRGVTSGLVHADKILKQTQGIGHVKFETADVVRHQLVTRVIEAYDRHKKGQVTDEESQEKEED

SEQ ID NO: 4209 - DNA, 1092 bp, Alloiococcus otitidis; identical to SEQ ID NO: 4207
  CDS (181)..(1089)

SEQ ID NO: 4210 - protein, 303 aa, Alloiococcus otitidis
MEEELDITLSTRGNKMILKGEEDRVTLAGEIISQLEFLYEKNSQITESDVLSAIRLAKSGQINQFIKMYENIIGRDVDGKPIRVRNVGQQRYVDTVSRNDIVFGLGPAGTGKTFLAVALAVEALRRNQVKRIILTRPAVEAGESLGFLPGDLKEKVDPYLRPLYDALFAIFGVSHTNRLMERETIEIAPLAYMRGRTLDDAFVILDEAQNTTIPQMKMFLTRLGFGSKMIINGDVSQIDLPRGVTSGLVHADKILKQTQGIGHVKFETADVVRHQLVTRVIEAYDRHKKGQVTDEESQEKEED

SEQ ID NO: 4211 - DNA, 1092 bp, Alloiococcus otitidis; identical to SEQ ID NO: 4207
  CDS (40)..(1089)

SEQ ID NO: 4212 - protein, 350 aa, Alloiococcus otitidis
MYAIIGGNIDKRSESFLTDQTYQSVRTFEDPEAAIAIFGSQNSYLALVEEELDITLSTRGNKMILKGEEDRVTLAGEIISQLEFLYEKNSQITESDVLSAIRLAKSGQINQFIKMYENIIGRDVDGKPIRVRNVGQQRYVDTVSRNDIVFGLGPAGTGKTFLAVALAVEALRRNQVKRIILTRPAVEAGESLGFLPGDLKEKVDPYLRPLYDALFAIFGVSHTNRLMERETIEIAPLAYMRGRTLDDAFVILDEAQNTTIPQMKMFLTRLGFGSKMIINGDVSQIDLPRGVTSGLVHADKILKQTQGIGHVKFETADVVRHQLVTRVIEAYDRHKKGQVTDEESQEKEED

SEQ ID NO: 4213 - DNA, 462 bp, Alloiococcus otitidis
  CDS (49)..(459)
gtagcgagggagatcgtcttgaccattctagaacaattaaacgatgatatgaaaaaggcgatgaaggctaaggataaagaatccttgaagaccattcggatgctcaaatcatcgctacaaaaagaacaattgaacaagcaggctgacttgtctgaagacgatgagatcgctgttatctctagcgagaagaaacagcgccaagattctttaaaagaattccagtcagctggccgggatgatttggtggaccaagttaaaggagaactggaagttgttgaccgctacctaccagagcagttaacagatgaagaagtcgaccaacttgtccaagaaaccatccaggaaactggagccaagtccatgcaagacatgggcaaggttatgggagccatcatgcccaaggttaaaggtagggcagatggtggccaggtcaattcaattgtcaaacaatacttatcatag

SEQ ID NO: 4214 - protein, 137 aa, Alloiococcus otitidis
MKKAMKAKDKESLKTIRMLKSSLQKEQLNKQADLSEDDEIAVISSEKKQRQDSLKEFQSAGRDDLVDQVKGELEVVDRYLPEQLTDEEVDQLVQETIQETGAKSMQDMGKVMGAIMPKVKGRADGGQVNSIVKQYLS

SEQ ID NO: 4215 - DNA, 462 bp, Alloiococcus otitidis; identical to SEQ ID NO: 4213
  CDS (19)..(459)

SEQ ID NO: 4216 - protein, 147 aa, Alloiococcus otitidis
MTILEQLNDDMKKAMKAKDKESLKTIRMLKSSLQKEQLNKQADLSEDDEIAVISSEKKQRQDSLKEFQSAGRDDLVDQVKGELEVVDRYLPEQLTDEEVDQLVQETIQETGAKSMQDMGKVMGAIMPKVKGRADGGQVNSIVKQYLS

SEQ ID NO: 4217 - DNA, 465 bp, Alloiococcus otitidis
  CDS (19)..(462)
atacatgagctagaaggggtggagaagttgacaacttatgaagaagcacttgacatcttaaaagacaacaagttaaaactaacctccaaacgaaaaaggatggttgaaattctctatgatgaagataagtacctgtcagctagtgacgtccaggccaagatgagccaagactaccaggggatcagcccagacaccatctatcgtaacctttataccttttatgacctcggtattatcgagaagaccgagttaaaaggagaaaaagtctttcggtctcactgtgatgtccatgaccaccaccaccattttatttgcaaaaactgtggccagaccagggaaattgatgcctgccccctagactacttccaggtccaactcccaggatgtgagatccagtcccaccgttttgaagtctacggcctgtgtgaaaaatgtaatcaaaaactcaaccatcaggcatcttag

SEQ ID NO: 4218 - protein, 148 aa, Alloiococcus otitidis
MEKLTTYEEALDILKDNKLKLTSKRKRMVEILYDEDKYLSASDVQAKMSQDYQGISPDTIYRNLYTFYDLGIIEKTELKGEKVFRSHCDVHDHHHHFICKNCGQTREIDACPLDYFQVQLPGCEIQSHRFEVYGLCEKCNQKLNHQAS

SEQ ID NO: 4219 - DNA, 843 bp, Alloiococcus otitidis
  CDS (34)..(840)
gttcaagacagaaaaacaaaggaggatgattcaatgaaccctggtcttatcatctataccctttccgattcagtcggcaatacggccatcaatgtagccaaaagtgctctagcccagttccctagccacaaggtccccattaaaaactttccttttatcaaagacgaccaagaactcttggctatcctaacccgggccaaagacagggaagctatggttatctataactttgccaagctagaccatgtcagcttggtggagagctttcaagaggaacatgacctctttgcctttaacctcctgacccccttgaccgaatacctagcagaccggattgggcatgcccctagccaagaagctggggccaaccaccaactaaaccaagcctacttcgaccggatcaatgccatggaatttgccgtccaatatgatgacggccaagaccccaatggttttttgcaggcggatattatcttattgggagtttcccgaacttccaagacccctctttctatttacctggccaatgaaggctttaaggtagccaacctccctgttatgccggaatccaccattcccaaccaaatctatcaggttgacccaaggaagattattggcctcaccaacagcaaagaccttttactggccattcgcaaggaacggatgcgggcatatggcttggatgacaacatgctttactctacccaagagcgaatagaggctgaactggactttgccaaccagctctaccaagacctgggttgcttcaccatcaacgtctccaacaagtccatagaagaaacaacggccatcatcaaggactacttaagccaggaagagtaa

SEQ ID NO: 4220 - protein, 269 aa, Alloiococcus otitidis
MNPGLIIYTLSDSVGNTAINVAKSALAQFPSHKVPIKNFPFIKDDQELLAILTRAKDREAMVIYNFAKLDHVSLVESFQEEHDLFAFNLLTPLTEYLADRIGHAPSQEAGANHQLNQAYFDRINAMEFAVQYDDGQDPNGFLQADIILLGVSRTSKTPLSIYLANEGFKVANLPVMPESTIPNQIYQVDPRKIIGLTNSKDLLLAIRKERMRAYGLDDNMLYSTQERIEAELDFANQLYQDLGCFTINVSNKSIEETTAIIKDYLSQEE

SEQ ID NO: 4221 - DNA, 1557 bp, Alloiococcus otitidis
  CDS (1285)..(1554)
catgtctatgttactttaatcagtggaaaacaagaggagatcattgtgatttcctctttctatttagtaggagtcttgagattgagtagtgaaaataaattaaccttcaaacacttccttgcaaaccagttgaccaaacgagacaatttacaaatcccccgttggcaaatttttgccgttttatttacaggagccgtgattgtggttctcaaccaaacggccatgtctaccgccttgcctaatatgattgaaagtttgggcattgaccctagcctaggccagtggattgtctcgggttataccttggtcaaagggattatggtccccataaccgcctttgccatgaccaagtaccggacacggaacttttttattttaatgttggccctcttctgtaccggtagttttttgactggtctgggctttaattttccggttgtggtcatggggacagtcatccagggtatagcggctgggatgatcatccccttgatgcagaccgtcctcttgaccttgatgccggttgaaagccgaggcactgctatgggggtaatgagtggggttattggtattggtccagcactgggtccccttgtcggtggggtcattgttgatgctttcacctgggaaattttattctacatctgggccttaatcacccttttattggttcctttaacttggctggtcttacccgatgtattgccaaatgcagatttaaccattaattgggccaatatccgggactccctcattggttttggcctcctcctctttagcttgtcagtctttggttcttccggtttttcttcggtcattgcctgggtcagcttgcttatcggtttagtctttgtcgccaagtttatccacttcaacctcaaggcagaccaaccaatcttaaatcttagactctttaaaaaaacctattaccgtcgggctgtcttggtagccaccttggggattgtcattatttcttgtctatccaacattatccctatttatgttcaaactgttaggggcttgggggcttccatagcaggcttaatcttaatgccagctggtatcatcaaaaccatcttagctcctatctcaggcaaactttatgacaaggttggagtggctcggattggccttatcggtggtatcttacttttagttgggtccttattactagttaccctcaatgaagctagctccctttacttactgatgatttactacggcatcttatcagccggttttggcttgtttaatatccctattaccactgctggcatgaatattatggccaaggaagatatgggacatgcgacttcagcccggcaaacggtccggcaaatctcttcaagttttgccgtttccctctcctttatcatcatgaccctggtgactattgccacttccggccaatcggtgggggttttccaagatggcggtccgacagacttaaatatggcaggagtccgaggcgcctttatcttggtggctatattttcaatcctagccatgatcttgatcttctttttaaaagaccctaaagaaaaaccagaccaatag

SEQ ID NO: 4222 - protein, 90 aa, Alloiococcus otitidis
MAKEDMGHATSARQTVRQISSSFAVSLSFIIMTLVTIATSGQSVGVFQDGGPTDLNMAGVRGAFILVAIFSILAMILIFFLKDPKEKPDQ

SEQ ID NO: 4223 - DNA, 1557 bp, Alloiococcus otitidis; identical to SEQ ID NO: 4221
  CDS (1117)..(1554)

SEQ ID NO: 4224 - protein, 146 aa, Alloiococcus otitidis
MARIGLIGGILLLVGSLLLVTLNEASSLYLLMIYYGILSAGFGLFNIPITTAGMNIMAKEDMGHATSARQTVRQISSSFAVSLSFIIMTLVTIATSGQSVGVFQDGGPTDLNMAGVRGAFILVAIFSILAMILIFFLKDPKEKPDQ

SEQ ID NO: 4225 - DNA, 1557 bp, Alloiococcus otitidis; identical to SEQ ID NO: 4221
  CDS (781)..(1554)

SEQ ID NO: 4226 - protein, 258 aa, Alloiococcus otitidis
MSVFGSSGFSSVIAWVSLLIGLVFVAKFIHFNLKADQPILNLRLFKKTYYRRAVLVATLGIVIISCLSNIIPIYVQTVRGLGASIAGLILMPAGIIKTILAPISGKLYDKVGVARIGLIGGILLLVGSLLLVTLNEASSLYLLMIYYGILSAGFGLFNIPITTAGMNIMAKEDMGHATSARQTVRQISSSFAVSLSFIIMTLVTIATSGQSVGVFQDGGPTDLNMAGVRGAFILVAIFSILAMILIFFLKDPKEKPDQ

SEQ ID NO: 4227 - DNA, 1557 bp, Alloiococcus otitidis; identical to SEQ ID NO: 4221
  CDS (319)..(1554)

SEQ ID NO: 4228 - protein, 412 aa, Alloiococcus otitidis
MVPITAFAMTKYRTRNFFILMLALFCTGSFLTGLGFNFPVVVMGTVIQGIAAGMIIPLMQTVLLTLMPVESRGTAMGVMSGVIGIGPALGPLVGGVIVDAFTWEILFYIWALITLLLVPLTWLVLPDVLPNADLTINWANIRDSLIGFGLLLFSLSVFGSSGFSSVIAWVSLLIGLVFVAKFIHFNLKADQPILNLRLFKKTYYRRAVLVATLGIVIISCLSNIIPIYVQTVRGLGASIAGLILMPAGIIKTILAPISGKLYDKVGVARIGLIGGILLLVGSLLLVTLNEASSLYLLMIYYGILSAGFGLFNIPITTAGMNIMAKEDMGHATSARQTVRQISSSFAVSLSFIIMTLVTIATSGQSVGVFQDGGPTDLNMAGVRGAFILVAIFSILAMILIFFLKDPKEKPDQ

SEQ ID NO: 4229 - DNA, 1557 bp, Alloiococcus otitidis; identical to SEQ ID NO: 4221
  CDS (223)..(1554)

SEQ ID NO: 4230 - protein, 444 aa, Alloiococcus otitidis
MSTALPNMIESLGIDPSLGQWIVSGYTLVKGIMVPITAFAMTKYRTRNFFILMLALFCTGSFLTGLGFNFPVVVMGTVIQGIAAGMIIPLMQTVLLTLMPVESRGTAMGVMSGVIGIGPALGPLVGGVIVDAFTWEILFYIWALITLLLVPLTWLVLPDVLPNADLTINWANIRDSLIGFGLLLFSLSVFGSSGFSSVIAWVSLLIGLVFVAKFIHFNLKADQPILNLRLFKKTYYRRAVLVATLGIVIISCLSNIIPIYVQTVRGLGASIAGLILMPAGIIKTILAPISGKLYDKVGVARIGLIGGILLLVGSLLLVTLNEASSLYLLMIYYGILSAGFGLFNIPITTAGMNIMAKEDMGHATSARQTVRQISSSFAVSLSFIIMTLVTIATSGQSVGVFQDGGPTDLNMAGVRGAFILVAIFSILAMILIFFLKDPKEKPDQ

SEQ ID NO: 4231 - DNA, 1557 bp, Alloiococcus otitidis; identical to SEQ ID NO: 4221
  CDS (130)..(1554)

SEQ ID NO: 4232 - protein, 475 aa, Alloiococcus otitidis
MTKRDNLQIPRWQIFAVLFTGAVIVVLNQTAMSTALPNMIESLGIDPSLGQWIVSGYTLVKGIMVPITAFAMTKYRTRNFFILMLALFCTGSFLTGLGFNFPVVVMGTVIQGIAAGMIIPLMQTVLLTLMPVESRGTAMGVMSGVIGIGPALGPLVGGVIVDAFTWEILFYIWALITLLLVPLTWLVLPDVLPNADLTINWANIRDSLIGFGLLLFSLSVFGSSGFSSVIAWVSLLIGLVFVAKFIHFNLKADQPILNLRLFKKTYYRRAVLVATLGIVIISCLSNIIPIYVQTVRGLGASIAGLILMPAGIIKTILAPISGKLYDKVGVARIGLIGGILLLVGSLLLVTLNEASSLYLLMIYYGILSAGFGLFNIPITTAGMNIMAKEDMGHATSARQTVRQISSSFAVSLSFIIMTLVTIATSGQSVGVFQDGGPTDLNMAGVRGAFILVAIFSILAMILIFFLKDPKEKPDQ

SEQ ID NO: 4233 - DNA, 1557 bp, Alloiococcus otitidis; identical to SEQ ID NO: 4221
  CDS (76)..(1554)

SEQ ID NO: 4234 - protein, 493 aa, Alloiococcus otitidis
MRLSSENKLTFKHFLANQLTKRDNLQIPRWQIFAVLFTGAVIVVLNQTAMSTALPNMIESLGIDPSLGQWIVSGYTLVKGIMVPITAFAMTKYRTRNFFILMLALFCTGSFLTGLGFNFPVVVMGTVIQGIAAGMIIPLMQTVLLTLMPVESRGTAMGVMSGVIGIGPALGPLVGGVIVDAFTWEILFYIWALITLLLVPLTWLVLPDVLPNADLTINWANIRDSLIGFGLLLFSLSVFGSSGFSSVIAWVSLLIGLVFVAKFIHFNLKADQPILNLRLFKKTYYRRAVLVATLGIVIISCLSNIIPIYVQTVRGLGASIAGLILMPAGIIKTILAPISGKLYDKVGVARIGLIGGILLLVGSLLLVTLNEASSLYLLMIYYGILSAGFGLFNIPITTAGMNIMAKEDMGHATSARQTVRQISSSFAVSLSFIIMTLVTIATSGQSVGVFQDGGPTDLNMAGVRGAFILVAIFSILAMILIFFLKDPKEKPDQ

SEQ ID NO: 4235 - DNA, 1557 bp, Alloiococcus otitidis; identical to SEQ ID NO: 4221
  CDS (46)..(1554)

SEQ ID NO: 4236 - protein, 503 aa, Alloiococcus otitidis
MISSFYLVGVLRLSSENKLTFKHFLANQLTKRDNLQIPRWQIFAVLFTGAVIVVLNQTAMSTALPNMIESLGIDPSLGQWIVSGYTLVKGIMVPITAFAMTKYRTRNFFILMLALFCTGSFLTGLGFNFPVVVMGTVIQGIAAGMIIPLMQTVLLTLMPVESRGTAMGVMSGVIGIGPALGPLVGGVIVDAFTWEILFYIWALITLLLVPLTWLVLPDVLPNADLTINWANIRDSLIGFGLLLFSLSVFGSSGFSSVIAWVSLLIGLVFVAKFIHFNLKADQPILNLRLFKKTYYRRAVLVATLGIVIISCLSNIIPIYVQTVRGLGASIAGLILMPAGIIKTILAPISGKLYDKVGVARIGLIGGILLLVGSLLLVTLNEASSLYLLMIYYGILSAGFGLFNIPITTAGMNIMAKEDMGHATSARQTVRQISSSFAVSLSFIIMTLVTIATSGQSVGVFQDGGPTDLNMAGVRGAFILVAIFSILAMILIFFLKDPKEKPDQ

SEQ ID NO: 4237 - DNA, 417 bp, Alloiococcus otitidis
  CDS (4)..(414)
aggatgattggattggatataaataatgctttacgattgttaatcattgtagttggcttgggctgggcaatttatgagattgtccaatttgtccggcgcaggaaggctgcgactcctttgaccaatgaggaatttaaagaggacatccgcaaggcccaagtcatcgacgtccgggagaaggatgaatttaaacgcaagcatattttaggggcaaggagcctcccttattcccagtttaaacaaagaatgaatgaatttcgtaaggaccaacccatttatttatatgaagaaaacaagatgctgagcttgcgggcaggcttgaaattaaaggaaaacggctttgaagatatctattacttaaaagatggcttttccaattgggatggccggacaaaaagtgacaggcttgacaattaa

SEQ ID NO: 4238 - protein, 137 aa, Alloiococcus otitidis
MIGLDINNALRLLIIVVGLGWAIYEIVQFVRRRKAATPLTNEEFKEDIRKAQVIDVREKDEFKRKHILGARSLPYSQFKQRMNEFRKDQPIYLYEENKMLSLRAGLKLKENGFEDIYYLKDGFSNWDGRTKSDRLDN

SEQ ID NO: 4239 - DNA, 1014 bp, Alloiococcus otitidis
  CDS (40)..(1011)
aattttctatatcaacttttaacgaggagttacgtacttatggcacaagacaagctaatcggaattgacctgggtgggaccacgactaagtttgccctactcacacaaactggcaagatagtggacaaatggtcgattaagacccagacagaagaccatgggagtcagatcctgccgaatatgattgcttcgattcaggccaagttagaggaatggaagttgactagccaagacatcttaggcattggcatgggatctcctggctctgttgaccgcaaggcagggacagttgtgggggcctataacttgaactggcaggaggtccaagcagttaaagcaaccatggaagaagagttaggcctagacttttacctggacaatgatgccaatgtggccgccttaggtgaacaatggcagggggctggagaccaagaccccaacctggtctttatgacccttggaacaggagtaggcggggggatcatcttggacaaccagctggtccacggcgcccatgatacagctggtgaaatcggccacttaactgtatccaatgaccgatttgacttcccttgtacttgtggcaagtctggctgcctggaatccatcgccagtgccagtggtattgttaaggtggcccaacaaatgttggctgaaaataagggtcaaagtcagctctaccaagtggctgaccggggagatttggaggccaaggtcatttttgacctggctaagcaaggggacgacttagctttattgatcgtcgacattgtttgtgattacctagccttcgccgccggcaatattgccaatattgtcaatccgtctgttattgtgattggtggcggggtatctcaggcaggagctattttaaaggaaaccgtggaaaaacacctggccgactacttgtttccgcccctaagggataagaccagggtcaagattgctcaactggaaagtgatgccggggtgatcggggcaggatctttagttttaaaagaaaaattagcttaa

SEQ ID NO: 4240 - protein, 324 aa, Alloiococcus otitidis
MAQDKLIGIDLGGTTTKFALLTQTGKIVDKWSIKTQTEDHGSQILPNMIASIQAKLEEWKLTSQDILGIGMGSPGSVDRKAGTVVGAYNLNWQEVQAVKATMEEELGLDFYLDNDANVAALGEQWQGAGDQDPNLVFMTLGTGVGGGIILDNQLVHGAHDTAGEIGHLTVSNDRFDFPCTCGKSGCLESIASASGIVKVAQQMLAENKGQSQLYQVADRGDLEAKVIFDLAKQGDDLALLIVDIVCDYLAFAAGNIANIVNPSVIVIGGGVSQAGAILKETVEKHLADYLFPPLRDKTRVKIAQLESDAGVIGAGSLVLKEKLA

SEQ ID NO: 4241 - DNA, 777 bp, Alloiococcus otitidis
  CDS (415)..(774)
aaattaaccaaagggcccggaattttttccttattaggagccaggtatgttatactttatgatagcttatgtaaaattgaggaagatgatatggtgcaaaatcgaaaactagctagcattcaaaacaagccttatgttacctatgccatcatcattataactgttatagtctatattatgatgacactgagtggtgggtcgcaaaatacagaggttttaatccagtatggggccaagttcaactttgctattatttattttaaccagtggtggcggctaatcaccccaatgtttctccacattggcctggcccacatcctctttaatctattgattgtttattacttaggatcaaatttggagtatttcttcggccactttaaatatgccttactttacctgctaggaggtataatggggaatatcttctcatttgccttcaacatttccatttcagctggggcttcaactgcgatttttggcttatttatgtctaccatagccctgtctcgcatctaccctaaccggattcaaatccaaaatattgccagccagtatggtctattaattggacttaatatttttattgggatattgtcaacaggcattgacaatatgggccacttgggtggtttagtcggaggatacttggcaacttatatgattaccaaaactcacaatcctggtagtcaattgaaatacaccttaatttatattgcaatagccttattgggtattttttggggctataatgaaattttctatatcaacttttaa

SEQ ID NO: 4242 - protein, 120 aa, Alloiococcus otitidis
MGNIFSFAFNISISAGASTAIFGLFMSTIALSRIYPNRIQIQNIASQYGLLIGLNIFIGILSTGIDNMGHLGGLVGGYLATYMITKTHNPGSQLKYTLIYIAIALLGIFWGYNEIFYINF

SEQ ID NO: 4243 - DNA, 777 bp, Alloiococcus otitidis; identical to SEQ ID NO: 4241
  CDS (91)..(774)

SEQ ID NO: 4244 - protein, 228 aa, Alloiococcus otitidis
MVQNRKLASIQNKPYVTYAIIIITVIVYIMMTLSGGSQNTEVLIQYGAKFNFAIIYFNQWWRLITPMFLHIGLAHILFNLLIVYYLGSNLEYFFGHFKYALLYLLGGIMGNIFSFAFNISISAGASTAIFGLFMSTIALSRIYPNRIQIQNIASQYGLLIGLNIFIGILSTGIDNMGHLGGLVGGYLATYMITKTHNPGSQLKYTLIYIAIALLGIFWGYNEIFYINF

SEQ ID NO: 4245 - DNA, 2301 bp, Alloiococcus otitidis
  CDS (256)..(2298)
acgattgactcgtttggcaactggttttttaatttggtcgcgagacaatctttagaaaagtttagggaaaaccccatgcatttcctagtcggatttgataaaattaggagtagattatttaacggaggggtaggcttgaaattgcctaacaagcgaagaagagaaaagttaaaatcgcaaattccatttcgattaaatttgctgttttttgttgtctttattttatttgcaacttttatcctgcgtctggcttatatgcaaatcattaaagaggaagaataccaagctgaagttgatcggacggaaagcacggttattagtggcccggttgcccggggtgaaatatacgataaccagctcaacaaattagtgggcaatgaagcccacaataccattacctatacacgggggcagaacgtctccaaccaagccatggccaatgttgccaaccgattggctaatattatcgacttgccaaatgccgacccatttgaatctgatgacccagatattaccgaaagggaaatgaaggactactattacgctattcaccgggacgaaattgatgatcaagttgaagcttacatggaagccaatgacattgaagaaatggaaagcagtgaccgcttggattttatcgatgaagaccaacttaagtctttatcggatgaggaaaaaaccgctacttcaattttttcgaccatgacttcagcctatgccttgagtacggttaatatcaaaaaccaagatgtgtcttcccaagagctagcccaggtcagcgaaaacttggatgacctaccaggggtcgatactggagtggactggcaacggatttatcctgaaggcaatatgctcaagtccattctcggccaggtctccagcgaggaaacgggtatcccagaagagcggattggtgaatacctagctaagggttattcccgtaatgaccgggttgggatttcctatttggaataccaatttgaagatgtcttgagtggtagcaagtctaaagtcgaaacggaaaccaacaagctgggagagattatttcccaaaatgtccgctatgcgggtagcaagggggacaacctggttttaaatatcgatattgatttccaggaaaaaatggaaggcatcgccattgactccctcaacaagagacggggcctcaatgattctatctacctgatagccattgacccaagggatgggggaatccttggctttaccggaaagcgggtgaacagtgacggagaaattgtcgatgacgccatgggaaacttaactaaattctttgaaatggggtccagtgtcaaaggggcgaccgtcctatcagcttacatggatggggtcttagatgattccaacaatatcattgtcgatgcccccatgaatttcactggaactagcagtatttcatccgtctttaaccaaagtgggtcggttcccctcaatgaaactcaggccatccaatattcctccaatatctacatgtccaggctagccatgcggatgggagacaaatgggactatgaaccaggtgagcagttgaatatggactatcaaaagtccatcgacaagatgcgctactacttctcccaatttggtttaggggtacccactggggtagagttaccaaatgaaatgattggccagcaaagtccggttgaaagccctggctcagctctctaccagtcttttggccagtttgatacctacacccccctccaattggcccaatgtattgctactattgccaacggaggtactcggtatgcaccacgcttcgtctccgaaatccggggaactcatcctgaaacaggggaagtgggtcagttgaaaaccaagattgaaccaaaaattttgaaccaaatcgatgtaacacccgaacagatggaccgggtcaaggaagggatgtacctagcagtcaatggagactatgggaccttgcctaaagtctttggtgatgcggaatatgtggcagccggtaaatcagggactgcccaagcctcttactggagtaatgacccggacctccgcggaaccagtgtcattaacatgaactttactggttttgccccttacgacaatcctgaaattgccgtcgctgctgtggtgccttacctgccagacaatatcaataatattgaaaacatgaatgccagcaaacgagtgatggatgcctactttggcgttggcgaatttgctgaggatgcagacgaccaagaagatgaaggcgatgaagaagaagcccaggaagaagtcgttcaggaagaggaagaccaagctgaccaggcggcctag

SEQ ID NO: 4246 - protein, 681 aa, Alloiococcus otitidis
MQIIKEEEYQAEVDRTESTVISGPVARGEIYDNQLNKLVGNEAHNTITYTRGQNVSNQAMANVANRLANIIDLPNADPFESDDPDITEREMKDYYYAIHRDEIDDQVEAYMEANDIEEMESSDRLDFIDEDQLKSLSDEEKTATSIFSTMTSAYALSTVNIKNQDVSSQELAQVSENLDDLPGVDTGVDWQRIYPEGNMLKSILGQVSSEETGIPEERIGEYLAKGYSRNDRVGISYLEYQFEDVLSGSKSKVETETNKLGEIISQNVRYAGSKGDNLVLNIDIDFQEKMEGIAIDSLNKRRGLNDSIYLIAIDPRDGGILGFTGKRVNSDGEIVDDAMGNLTKFFEMGSSVKGATVLSAYMDGVLDDSNNIIVDAPMNFTGTSSISSVFNQSGSVPLNETQAIQYSSNIYMSRLAMRMGDKWDYEPGEQLNMDYQKSIDKMRYYFSQFGLGVPTGVELPNEMIGQQSPVESPGSALYQSFGQFDTYTPLQLAQCIATIANGGTRYAPRFVSEIRGTHPETGEVGQLKTKIEPKILNQIDVTPEQMDRVKEGMYLAVNGDYGTLPKVFGDAEYVAAGKSGTAQASYWSNDPDLRGTSVINMNFTGFAPYDNPEIAVAAVVPYLPDNINNIENMNASKRVMDAYFGVGEFAEDADDQEDEGDEEEAQEEVVQEEEDQADQAA

SEQ ID NO: 4247 - DNA, 2301 bp, Alloiococcus otitidis; identical to SEQ ID NO: 4245
  CDS (136)..(2298)

SEQ ID NO: 4248 - protein, 721 aa, Alloiococcus otitidis
MKLPNKRRREKLKSQIPFRLNLLFFVVFILFATFILRLAYMQIIKEEEYQAEVDRTESTVISGPVARGEIYDNQLNKLVGNEAHNTITYTRGQNVSNQAMANVANRLANIIDLPNADPFESDDPDITEREMKDYYYAIHRDEIDDQVEAYMEANDIEEMESSDRLDFIDEDQLKSLSDEEKTATSIFSTMTSAYALSTVNIKNQDVSSQELAQVSENLDDLPGVDTGVDWQRIYPEGNMLKSILGQVSSEETGIPEERIGEYLAKGYSRNDRVGISYLEYQFEDVLSGSKSKVETETNKLGEIISQNVRYAGSKGDNLVLNIDIDFQEKMEGIAIDSLNKRRGLNDSIYLIAIDPRDGGILGFTGKRVNSDGEIVDDAMGNLTKFFEMGSSVKGATVLSAYMDGVLDDSNNIIVDAPMNFTGTSSISSVFNQSGSVPLNETQAIQYSSNIYMSRLAMRMGDKWDYEPGEQLNMDYQKSIDKMRYYFSQFGLGVPTGVELPNEMIGQQSPVESPGSALYQSFGQFDTYTPLQLAQCIATIANGGTRYAPRFVSEIRGTHPETGEVGQLKTKIEPKILNQIDVTPEQMDRVKEGMYLAVNGDYGTLPKVFGDAEYVAAGKSGTAQASYWSNDPDLRGTSVINMNFTGFAPYDNPEIAVAAVVPYLPDNINNIENMNASKRVMDAYFGVGEFAEDADDQEDEGDEEEAQEEVVQEEEDQADQAA

SEQ ID NO: 4249 - DNA, 2301 bp, Alloiococcus otitidis; identical to SEQ ID NO: 4245
  CDS (76)..(2298)

SEQ ID NO: 4250 - protein, 741 aa, Alloiococcus otitidis
MHFLVGFDKIRSRLFNGGVGLKLPNKRRREKLKSQIPFRLNLLFFVVFILFATFILRLAYMQIIKEEEYQAEVDRTESTVISGPVARGEIYDNQLNKLVGNEAHNTITYTRGQNVSNQAMANVANRLANIIDLPNADPFESDDPDITEREMKDYYYAIHRDEIDDQVEAYMEANDIEEMESSDRLDFIDEDQLKSLSDEEKTATSIFSTMTSAYALSTVNIKNQDVSSQELAQVSENLDDLPGVDTGVDWQRIYPEGNMLKSILGQVSSEETGIPEERIGEYLAKGYSRNDRVGISYLEYQFEDVLSGSKSKVETETNKLGEIISQNVRYAGSKGDNLVLNIDIDFQEKMEGIAIDSLNKRRGLNDSIYLIAIDPRDGGILGFTGKRVNSDGEIVDDAMGNLTKFFEMGSSVKGATVLSAYMDGVLDDSNNIIVDAPMNFTGTSSISSVFNQSGSVPLNETQAIQYSSNIYMSRLAMRMGDKWDYEPGEQLNMDYQKSIDKMRYYFSQFGLGVPTGVELPNEMIGQQSPVESPGSALYQSFGQFDTYTPLQLAQCIATIANGGTRYAPRFVSEIRGTHPETGEVGQLKTKIEPKILNQIDVTPEQMDRVKEGMYLAVNGDYGTLPKVFGDAEYVAAGKSGTAQASYWSNDPDLRGTSVINMNFTGFAPYDNPEIAVAAVVPYLPDNINNIENMNASKRVMDAYFGVGEFAEDADDQEDEGDEEEAQEEVVQEEEDQADQAA

SEQ ID NO: 4251 - DNA, 2301 bp, Alloiococcus otitidis; identical to SEQ ID NO: 4245
  CDS (34)..(2298)

SEQ ID NO: 4252 - protein, 755 aa, Alloiococcus otitidis
MVARQSLEKFRENPMHFLVGFDKIRSRLFNGGVGLKLPNKRRREKLKSQIPFRLNLLFFVVFILFATFILRLAYMQIIKEEEYQAEVDRTESTVISGPVARGEIYDNQLNKLVGNEAHNTITYTRGQNVSNQAMANVANRLANIIDLPNADPFESDDPDITEREMKDYYYAIHRDEIDDQVEAYMEANDIEEMESSDRLDFIDEDQLKSLSDEEKTATSIFSTMTSAYALSTVNIKNQDVSSQELAQVSENLDDLPGVDTGVDWQRIYPEGNMLKSILGQVSSEETGIPEERIGEYLAKGYSRNDRVGISYLEYQFEDVLSGSKSKVETETNKLGEIISQNVRYAGSKGDNLVLNIDIDFQEKMEGIAIDSLNKRRGLNDSIYLIAIDPRDGGILGFTGKRVNSDGEIVDDAMGNLTKFFEMGSSVKGATVLSAYMDGVLDDSNNIIVDAPMNFTGTSSISSVFNQSGSVPLNETQAIQYSSNIYMSRLAMRMGDKWDYEPGEQLNMDYQKSIDKMRYYFSQFGLGVPTGVELPNEMIGQQSPVESPGSALYQSFGQFDTYTPLQLAQCIATIANGGTRYAPRFVSEIRGTHPETGEVGQLKTKIEPKILNQIDVTPEQMDRVKEGMYLAVNGDYGTLPKVFGDAEYVAAGKSGTAQASYWSNDPDLRGTSVINMNFTGFAPYDNPEIAVAAVVPYLPDNINNIENMNASKRVMDAYFGVGEFAEDADDQEDEGDEEEAQEEVVQEEEDQADQAA

SEQ ID NO: 4253 - DNA, 345 bp, Alloiococcus otitidis
  CDS (22)..(342)
aaagccagctactcttttttattggccaaatacctaggccgcctggtcagcttggtcttcctcttcctgaacgacttcttcctgggcttcttcttcatcgccttcatcttcttggtcgtctgcatcctcagcaaattcgccaacgccaaagtaggcatccatcactcgtttgctggcattcatgttttcaatattattgatattgtctggcaggtaaggcaccacagcagcgacggcaatttcaggattgtcgtaaggggcaaaaccagtaaagttcatgttaatgacactggttccgcggaggtccgggtcattactccagtaagaggcttgggcagtccctga

SEQ ID NO: 4254 - protein, 107 aa, Alloiococcus otitidis
MAKYLGRLVSLVFLFLNDFFLGFFFIAFIFLVVCILSKFANAKVGIHHSFAGIHVFNIIDIVWQVRHHSSDGNFRIVVRGKTSKVHVNDTGSAEVRVITPVRGLGSP

SEQ ID NO: 4255 - DNA, 612 bp, Alloiococcus otitidis
  CDS (4)..(609)
cttatgacttaccaattagaagacttaccatacgcatatgacgcattggaaccttatattgatgaagaaaccatgaaacttcaccatgacaaacaccaccaaacttatgtggacaagaccaatgcagctctcgaaggtcaagaaaaatatgctgacttgtcgattgaagacctagttgctcaattaaactcgctgccggaagaacttcaagtaccggtcttaaaaaatggtgggggtcatgccaaccataaactcttctggaccgttctttcgccaaatggtggaggccagccagaaggagatttaggtcaagctattgaggaaaaattcggtagcttcgaaaaattccaagaagaatttaaagctgcagcgactggtcaatttgggtcaggctgggcttggttggttgttaacaatggcacattggaaatcgatgcgactcctaaccaagaatccccacttacttcaggcaaaacacctatcttgggtcttgacgtatgggaacacgcttactaccttaactaccaaaatagacgacctgactatgtagatgctttctggaatgtcgtaaactgggatgaagtagcaagaagataccaagaagctaaataa

SEQ ID NO: 4256 - protein, 202 aa, Alloiococcus otitidis
MTYQLEDLPYAYDALEPYIDEETMKLHHDKHHQTYVDKTNAALEGQEKYADLSIEDLVAQLNSLPEELQVPVLKNGGGHANHKLFWTVLSPNGGGQPEGDLGQAIEEKFGSFEKFQEEFKAAATGQFGSGWAWLVVNNGTLEIDATPNQESPLTSGKTPILGLDVWEHAYYLNYQNRRPDYVDAFWNVVNWDEVARRYQEAK

SEQ ID NO: 4257 - DNA, 795 bp, Alloiococcus otitidis
  CDS (478)..(792)
aggaaaggaccgattaacttgtttgaatttttaaaactcagcctaagttcccccttggaaatccaccaaggcagaaaaatgactaaaaataccttctttgccctttttattgctttcgtcatcatctcactcatccctcccctcttcaccctagtcccagaataccagcaatttaggtctgatgtgagtgaagtggaaggtcaattgccggattttgccatcgaagacgaccagataaaaacagaccaagaagactacattcattttacagatacaatttccctatattttgaccctgacaaccaaatgacggaagatgagaccattgaccggaatgtggagttgaacttctccccaatcaatattgctttaagccaggaccaaatgaccctctacgtctatggcagtggccagtcaatttcttatgccaacttgcctgactttaaccaggaccaattttcttttcttttaaattccatgacccaaatcaacctacccgtcatcttacttgccttctttgttcttttcggggttggagccatcattctaatctaccaatacattttagttgccctaaccaattattttatcagtatcttttatttacaagggttgggttttaaagctgtctttaaaatttccctcctagctattgccctccccaccctagccttatccattgctagtgcggtcggtttacaaaccagtttgagcggtcctctctttaccatcttttccatcctcatcttcttcctatccatccgccgtcttaaaaaagccaagaaagccaattag

SEQ ID NO: 4258 - protein, 105 aa, Alloiococcus otitidis
MTQINLPVILLAFFVLFGVGAIILIYQYILVALTNYFISIFYLQGLGFKAVFKISLLAIALPTLALSIASAVGLQTSLSGPLFTIFSILIFFLSIRRLKKAKKAN

SEQ ID NO: 4259 - DNA, 795 bp, Alloiococcus otitidis; identical to SEQ ID NO: 4257
  CDS (79)..(792)

SEQ ID NO: 4260 - protein, 238 aa, Alloiococcus otitidis
MTKNTFFALFIAFVIISLIPPLFTLVPEYQQFRSDVSEVEGQLPDFAIEDDQIKTDQEDYIHFTDTISLYFDPDNQMTEDETIDRNVELNFSPINIALSQDQMTLYVYGSGQSISYANLPDFNQDQFSFLLNSMTQINLPVILLAFFVLFGVGAIILIYQYILVALTNYFISIFYLQGLGFKAVFKISLLAIALPTLALSIASAVGLQTSLSGPLFTIFSILIFFLSIRRLKKAKKAN

SEQ ID NO: 4261 - DNA, 795 bp, Alloiococcus otitidis; identical to SEQ ID NO: 4257
  CDS (55)..(792)

SEQ ID NO: 4262 - protein, 246 aa, Alloiococcus otitidis
MEIHQGRKMTKNTFFALFIAFVIISLIPPLFTLVPEYQQFRSDVSEVEGQLPDFAIEDDQIKTDQEDYIHFTDTISLYFDPDNQMTEDETIDRNVELNFSPINIALSQDQMTLYVYGSGQSISYANLPDFNQDQFSFLLNSMTQINLPVILLAFFVLFGVGAIILIYQYILVALTNYFISIFYLQGLGFKAVFKISLLAIALPTLALSIASAVGLQTSLSGPLFTIFSILIFFLSIRRLKKAKKAN

SEQ ID NO: 4263 - DNA, 795 bp, Alloiococcus otitidis; identical to SEQ ID NO: 4257
  CDS (19)..(792)

SEQ ID NO: 4264 - protein, 258 aa, Alloiococcus otitidis
MFEFLKLSLSSPLEIHQGRKMTKNTFFALFIAFVIISLIPPLFTLVPEYQQFRSDVSEVEGQLPDFAIEDDQIKTDQEDYIHFTDTISLYFDPDNQMTEDETIDRNVELNFSPINIALSQDQMTLYVYGSGQSISYANLPDFNQDQFSFLLNSMTQINLPVILLAFFVLFGVGAIILIYQYILVALTNYFISIFYLQGLGFKAVFKISLLAIALPTLALSIASAVGLQTSLSGPLFTIFSILIFFLSIRRLKKAKKAN

SEQ ID NO: 4265 - DNA, 381 bp, Alloiococcus otitidis
  CDS (100)..(378)
gtaagcagattagagaccgcaaatgggggatgtcggaagaagctgtccccaaacgctatcccaaatcaaaatggcaaccggacccggtgtcttatcccggtgaaaaagtccaaattgatatcaaatacgtccctcatgaatgcattcagtttgagagttatgaccgtcgttactaccaaatcacggccattgatgagttctctcgcaaacgacacagtaccatcgtcgacgaaaaaagtgtcacgcatacggcccaatttctgcttgatttacaagaccagctgggctttcaaattcagatggttcaaactgataatggggctgagtttgttaacgatcccgataaaacaacgaaaaagaccttgtttgaacaacgcttaa

SEQ ID NO: 4266 - protein, 93 aa, Alloiococcus otitidis
MKKSKLISNTSLMNAFSLRVMTVVTTKSRPLMSSLANDTVPSSTKKVSRIRPNFCLIYKTSWAFKFRWFKLIMGLSLLTIPIKQRKRPCLNNA

SEQ ID NO: 4267 - DNA, 969 bp, Alloiococcus otitidis
  CDS (28)..(966)
cacccaacagaaaggaagcatcctcgtatggctattataacagaagaaatgcgctatcgcgaaaaagttgtaaaatatgcgatcaaacagggcaacaatgcccaagcagcccgccgttaccacaccaaccggatgcaggtcaaacggtggcgtgaccgttatgatggcacggtcgaaagtctgcgaaaccagtccactcggccccatagccatcctcgtcagcaccaaaaagaggagctgaccttgattaaaaaagtttatcaacgctacggccatgaagggcttgcccaggtttacgttgaatgtcagaaaaggggctatcgtcggtcctatggcagtatgagtaagcagattagagaccgcaaatgggggatgtcggaagaagctgtccccaaacgctatcccaaatcaaaatggcaaccggacccggtgtcttatcccggtgaaaaagtccaaattgatatcaaatacgtccctcatgaatgcattcagtttgagagttatgaccgtcgttactaccaaatcacggccattgatgagttctctcgcaaacgacacagtaccatcgtcgacgaaaaaagtgtcacgcatacggcccaatttctgcttgatttacaagaccagctgggctttcaaattcagatggttcaaactgataatggggctgagtttgttaacgatcccgataaaacaacgaaaaagaccttgtttgaacaacgcttaaaagagcttggcattcagtaccgaaccacccggccctactccccttggcaaaacggaaaggtcgaaagaagccaccgggaagatcaagttcgtttttatagtaagcgcgtttttacatcggaagcggatatgaagaagcaacaccagcggtatatgagtcgccataataacattgtccgaaaagtcctcaattttcgaagtcctaatcaagtggtcgatcagtatagggcagaagtcgcttcttag

SEQ ID NO: 4268 - protein, 313 aa, Alloiococcus otitidis
MAIITEEMRYREKVVKYAIKQGNNAQAARRYHTNRMQVKRWRDRYDGTVESLRNQSTRPHSHPRQHQKEELTLIKKVYQRYGHEGLAQVYVECQKRGYRRSYGSMSKQIRDRKWGMSEEAVPKRYPKSKWQPDPVSYPGEKVQIDIKYVPHECIQFESYDRRYYQITAIDEFSRKRHSTIVDEKSVTHTAQFLLDLQDQLGFQIQMVQTDNGAEFVNDPDKTTKKTLFEQRLKELGIQYRTTRPYSPWQNGKVERSHREDQVRFYSKRVFTSEADMKKQHQRYMSRHNNIVRKVLNFRSPNQVVDQYRAEVAS

SEQ ID NO: 4269 - DNA, 372 bp, Alloiococcus otitidis
  CDS (16)..(369)
accacttcatcaatcgtgaagtcaaagttattcattcggtcatttttcaagtcatggaagactacagccccaaccccaacctggtctgcaatttcttccttgttggctaggtctgggtttttatcttcaatttgttccaaggcccgcttgctggcttcgtctaaaacatcttccaataagaccaacttgccttttcgggtggataatttttgtccgtccttggtaatcaagccaaagggaatgtggtggatatcttgggcccagtcaaagccaagttcctgcaagacacctttgagttgtttaaagtggttagcctgttcttggcctaccacgtatagggcttgggcaaagtcgtattcttttttacggtag

SEQ ID NO: 4270 - protein, 118 aa, Alloiococcus otitidis
MKSKLFIRSFFKSWKTTAPTPTWSAISSLLARSGFLSSICSKARLLASSKTSSNKTNLPFRVDNFCPSLVIKPKGMWWISWAQSKPSSCKTPLSCLKWLACSWPTTYRAWAKSYSFLR

SEQ ID NO: 4271 - DNA, 1716 bp, Alloiococcus otitidis
  CDS (25)..(1713)
agtatagtatttaggaggttacttatggattataaattaaagatagctgaaagtatccaccaggtcttacaagaggatcttaccaaagaagatatctactccctcttggaacggcctaagttggaagaacacggggatctcgccttcccgacttttcagctggcccgtatttttaaaaagaaccccaaggaaattgccagtgacctagcaggtaaaatctcttctgacttggttgaccaagtcgaagcagttgggccctacctcaactttcatttaaaccgaaaaacggtctcgtctgccatcattcaagaaattttagaccaagacgaaaactacggcgatcagagtgtcggacaaggacaaaatgttcctattgacatgtcctcccctaatatagccaaacccatgtccatgggccacttacggtcgactgttatcggcaatgccctagcgaatataatggaaaagatgggtttcaacccgatcaaaatcaaccacctgggtgattggggtacccagtttgggaagttgatttatgcttataaaacttggggcgatccccaggcaatcgaagaggaccctattccggaattattgcggatttacgtcaaattccatgaagaggctgaagacaatcctgaattagaagaccaaggcaggttgtggtttgctaagctagaacaaggtgattctgaagccctagaactgtgggaaaaatttagggccctttccctagaagaattcaacaagatctaccaacgcttaaatgttgaatttgattcttacaatggggaagccttttacaacgacaagatggaccaaactattgaactgattgaaaattccggtaagctggttgaagaccagggggcccagattattaaattggacaaatacgacttaaacccagccttgatcaagaaaaaagacgggtccaccctctacattacccgagatattgcagcagccatctaccgtaaaaaagaatacgactttgcccaagccctatacgtggtaggccaagaacaggctaaccactttaaacaactcaaaggtgtcttgcaggaacttggctttgactgggcccaagatatccaccacattccctttggcttgattaccaaggacggacaaaaattatccacccgaaaaggcaagttggtcttattggaagatgttttagacgaagccagcaagcgggccttggaacaaattgaagataaaaacccagacctagccaacaaggaagaaattgcagaccaggttggggttggggctgtagtcttccatgacttgaaaaatgaccgaatgaataactttgacttcacgattgatgaagtggttcaatttgaaggagaaactggtccctatgtccagtattcccgggtccgggccctcagcattttagagaatagccaagttgaccttgaccctaaacaagtgcaaggcttagaagatgaccatgtttggtcagttgtgaaattactggaaaaattcccaaacgtattatccagagcttcaaaaaattatgatccttccctcattgccaagtatgtaatcgacctgtcccaagcctttaacaagtattatgccaatgtccgggtcctggatgaagatggagacttgaccagcagactagccctagttaaggcagttgaaattttaattaaaatcaacctcaacctcctaggcttgtcttccccaagcgaaatgtag

SEQ ID NO: 4272 - protein, 563 aa, Alloiococcus otitidis
MDYKLKIAESIHQVLQEDLTKEDIYSLLERPKLEEHGDLAFPTFQLARIFKKNPKEIASDLAGKISSDLVDQVEAVGPYLNFHLNRKTVSSAIIQEILDQDENYGDQSVGQGQNVPIDMSSPNIAKPMSMGHLRSTVIGNALANIMEKMGFNPIKINHLGDWGTQFGKLIYAYKTWGDPQAIEEDPIPELLRIYVKFHEEAEDNPELEDQGRLWFAKLEQGDSEALELWEKFRALSLEEFNKIYQRLNVEFDSYNGEAFYNDKMDQTIELIENSGKLVEDQGAQIIKLDKYDLNPALIKKKDGSTLYITRDIAAAIYRKKEYDFAQALYVVGQEQANHFKQLKGVLQELGFDWAQDIHHIPFGLITKDGQKLSTRKGKLVLLEDVLDEASKRALEQIEDKNPDLANKEEIADQVGVGAVVFHDLKNDRMNNFDFTIDEVVQFEGETGPYVQYSRVRALSILENSQVDLDPKQVQGLEDDHVWSVVKLLEKFPNVLSRASKNYDPSLIAKYVIDLSQAFNKYYANVRVLDEDGDLTSRLALVKAVEILIKINLNLLGLSSPSEM

SEQ ID NO: 4273 - DNA, 1014 bp, Alloiococcus otitidis
  CDS (13)..(1011)
tcgactaaaccaatgaatataaggagaattcacatgactcaagcccatgatagcacactttcccccaaaggaacacatttgaccctagccgaaatgcataaaatcgaagcctataaggccgaaggctattccaatcgacagattaccaggctgcttgggcgttgtccgcaaaccatccacaatgccatcaaaaccggttccgtcccccaaaaacgccaacagaaacactatgggaaaacttacacctactatgacaacatctattttgccgacgttcatgccaaggcctaccaagaccaccgccgtcactgtgggcgacgacccaaatgggtcgacaattccgcctttcttgactgggctgaccaaaaactcttgcaggagaactggtcgcccgatgtggtggttcatcaagccaaagaagtctttgagcctgaccagattcccagcacgtcaactttgtaccattggattgaccgagagttgatgcgtacacggaatgccgacctcttggaaaaagtggggcggaaagaccgccaagatcaccgccggggacgtcccaatagaaagacattggggctttcgattgaagaacgccctcaaaccgttgaaaatcgtcaatcttttggccattgggagatcgacacggttgtgggccgaaagtggcaaggcgaccccgtcttactgactctggtggagagaaaaacccggtttgagaagctctctaaaataccctgtcaaagtgccagggcagtcactcagaccttacaagcctttttgaaggggctgatagacaaggccagtcaagtcttccagtccatcacagctgataatggcagtgaatttgctagcttaggccaagtctccaaagacatcccctctttcttctgccgtccctatgcttcttacgaacgaagcagcagtgagaaccaacataaattgattcggcgcttcctacccaaataccagtctttccaagacttaaccgacagtcaggtcagacgaatccaacaatga

SEQ ID NO: 4274 - protein, 333 aa, Alloiococcus otitidis
MNIRRIHMTQAHDSTLSPKGTHLTLAEMHKIEAYKAEGYSNRQITRLLGRCPQTIHNAIKTGSVPQKRQQKHYGKTYTYYDNIYFADVHAKAYQDHRRHCGRRPKWVDNSAFLDWADQKLLQENWSPDVVVHQAKEVFEPDQIPSTSTLYHWIDRELMRTRNADLLEKVGRKDRQDHRRGRPNRKTLGLSIEERPQTVENRQSFGHWEIDTVVGRKWQGDPVLLTLVERKTRFEKLSKIPCQSARAVTQTLQAFLKGLIDKASQVFQSITADNGSEFASLGQVSKDIPSFFCRPYASYERSSSENQHKLIRRFLPKYQSFQDLTDSQVRRIQQ

SEQ ID NO: 4275 - DNA, 396 bp, Alloiococcus otitidis
  CDS (94)..(393)
ccgaaatgcataaaatcgaagcctataaggccgaaggctattccaatcgacagattaccaggctgcttgggcgttgtccgcaaaccatccacaatgccatcaaaaccggttccgtcccccaaaaacgccaacagaaacactatgggaaaacttacacctactatgacaacatctattttgccgacgttcatgccaaggcctaccaagaccaccgccgtcactgtgggcgacgacccaaatgggtcgacaattccgcctttcttgactgggctgaccaaaaactcttgcaggagaactggtcgcccgatgtggtggttcatcaagccaaagaagtctttgagcctgaccagattcccagcacgtcaactttgtaccattggattgaccgagagttga

SEQ ID NO: 4276 - protein, 100 aa, Alloiococcus otitidis
MPSKPVPSPKNANRNTMGKLTPTMTTSILPTFMPRPTKTTAVTVGDDPNGSTIPPFLTGLTKNSCRRTGRPMWWFIKPKKSLSLTRFPARQLCTIGLTES

SEQ ID NO: 4277 - DNA, 366 bp, Alloiococcus otitidis
  CDS (43)..(363)
cgtgctgggaatctggtcaggctcaaagacttctttggcttgatgaaccaccacatcgggcgaccagttctcctgcaagagtttttggtcagcccagtcaagaaaggcggaattgtcgacccatttgggtcgtcgcccacagtgacggcggtggtcttggtaggccttggcatgaacgtcggcaaaatagatgttgtcatagtaggtgtaagttttcccatagtgtttctgttggcgtttttgggggacggaaccggttttgatggcattgtggatggtttgcggacaacgcccaagcagcctggtaatctgtcgattggaatagccttcggccttataggcttcgattttatgcatttcggctag

SEQ ID NO: 4278 - protein, 107 aa, Alloiococcus otitidis
MNHHIGRPVLLQEFLVSPVKKGGIVDPFGSSPTVTAVVLVGLGMNVGKIDVVIVGVSFPIVFLLAFLGDGTGFDGIVDGLRTTPKQPGNLSIGIAFGLIGFDFMHFG

SEQ ID NO: 4279 - DNA, 552 bp, Alloiococcus otitidis
  CDS (1)..(549)
atgaaatctaaagttttagagaatgaagtaagacaaacttttatgagtgtcacatggtctcataaaatacaagaaaaacaagcggaaatatgttttagtagatataaagcttgggaaattattagaataatatgttctgctttaactacagtaggattattttcacttattttttcggaccaattaattgttaagattatatctgcgatattgtctctaacaattacattcataagcatgatgttcaagtcatttaacttacaggaaatgtctgacaaacataaatcaacagcaaataaattgctcattatgcgtgacaagttcaggaccttattggtagagatacatttagaaatagaagaagattcagaattattaagtgaatataaaattctacaaaatgagcttcatgaaatatataatgaagctcctaacacaactaaaaaagcagtagataaggctagaacattcttagaaataaaagaagataataagttttctgatgaagaaatcgatagaaatctacctgaaaatcttagatatggaggttaa

SEQ ID NO: 4280 - protein, 183 aa, Alloiococcus otitidis
MKSKVLENEVRQTFMSVTWSHKIQEKQAEICFSRYKAWEIIRIICSALTTVGLFSLIFSDQLIVKIISAILSLTITFISMMFKSFNLQEMSDKHKSTANKLLIMRDKFRTLLVEIHLEIEEDSELLSEYKILQNELHEIYNEAPNTTKKAVDKARTFLEIKEDNKFSDEEIDRNLPENLRYGG

SEQ ID NO: 4281 - DNA, 801 bp, Alloiococcus otitidis
  CDS (1)..(798)
gtgtctaattatgtaaagaaataccctgatattattcctcaagaatctagatctaaaatatcaataaggtataaaaaaataacaaaatcgataaatagtggattttggaattcaactagtgaaactaataatagtttttatgtgggttcttatgggagaaatactgcaattagtaccagtgacattgatatattaattttattacctagctcagaatttgataggtttaataatctgagtggtaattctcaatctcgccttttacaatcagttaagaatgccattaaaacaagttatccaaacagtgatatacgagcagatggtcaagttattaaaataaattttagtgatggtattaaattcgaaatacttcctacttttaaaaatatatatggtgcatacatatatccagatagtaatctaggtggaaactggaagtctacaaatccaaaaatagaacaggaagctatgagacaaagagataaagaaagtaatggactattggtagctacttgcagacatttaagatttattagggataatttttataatagctgtcatttatcagggattgtaatagatagttttgtatataatgcaattggaaattggaagtttgttgagaatgtaacatcgacaacaacacaaggcaattatgaaaaaactttattaaattattttattgatgaaagtaaatggtggtcaatagttcctctaagagcgccagggagcaaagatgaagtttcaacaaacgatagtattgagtgtttagaaaaagttttaaattatatggttagataa

SEQ ID NO: 4282 - protein, 266 aa, Alloiococcus otitidis
MSNYVKKYPDIIPQESRSKISIRYKKITKSINSGFWNSTSETNNSFYVGSYGRNTAISTSDIDILILLPSSEFDRFNNLSGNSQSRLLQSVKNAIKTSYPNSDIRADGQVIKINFSDGIKFEILPTFKNIYGAYIYPDSNLGGNWKSTNPKIEQEAMRQRDKESNGLLVATCRHLRFIRDNFYNSCHLSGIVIDSFVYNAIGNWKFVENVTSTTTQGNYEKTLLNYFIDESKWWSIVPLRAPGSKDEVSTNDSIECLEKVLNYMVR

SEQ ID NO: 4283 - DNA, 702 bp, Alloiococcus otitidis
  CDS (1)..(699)
atggttaggcaagacaagcaaaagtacattaaagatttggcccaaagaccctttttccaagtctttgacagccaagatattaagcaaataaaggaccagtccattctgcgaaactataataaaaaccaagtggtcagctatgaaggagaccacaagcactactattattttgtcctggaaggcttaattaaacttgagcggacaacctataacggcaattatagttatgtggattttgtaattgaaaaccgctttgtggcttacggagatcttttcaataatgattactatagttacaatattatagctgaaacaccaactcgcctgctcatgatccccaccgacttatttgaaagcatcattagccaaaatagtgacttgctggtcgaattttaccgtagcttgtcggatgacttgtttttccaagaaaagaggatccaactagctgccgtctccagtgccaaagaaagggttgaattgatgcttgccttgtggatgcttgacctgggaacccggcagggagaggccgtactaatcccgtatcccttgaccatcatccaattgtcggaagtggccggtactacccgggagacggcgggcaaagtggtcaaggaactgacccaaaacaaacgactggagtacagttgcaaggaaatcaaggtcttagacactgattatttcaaccacttgttagaaggttag

SEQ ID NO: 4284 - protein, 233 aa, Alloiococcus otitidis
MVRQDKQKYIKDLAQRPFFQVFDSQDIKQIKDQSILRNYNKNQVVSYEGDHKHYYYFVLEGLIKLERTTYNGNYSYVDFVIENRFVAYGDLFNNDYYSYNIIAETPTRLLMIPTDLFESIISQNSDLLVEFYRSLSDDLFFQEKRIQLAAVSSAKERVELMLALWMLDLGTRQGEAVLIPYPLTIIQLSEVAGTTRETAGKVVKELTQNKRLEYSCKEIKVLDTDYFNHLLEG

SEQ ID NO: 4285 - DNA, 282 bp, Alloiococcus otitidis
  CDS (16)..(279)
tcagtgtctaagaccttgatttccttgcaactgtactccagtcgtttgttttgggtcagttccttgaccactttgcccgccgtctcccgggtagtaccggccacttccgacaattggatgatggtcaagggatacgggattagtacggcctctccctgccgggttcccaggtcaagcatccacaaggcaagcatcaattcaaccctttctttggcactggagacggcagctagttggatcctcttttcttggaaaaacaagtcatccgacaagctacggtaa

SEQ ID NO: 4286 - protein, 88 aa, Alloiococcus otitidis
MISLQLYSSRLFWVSSLTTLPAVSRVVPATSDNWMMVKGYGISTASPCRVPRSSIHKASINSTLSLALETAASWILFSWKNKSSDKLR

SEQ ID NO: 4287 - DNA, 282 bp, Alloiococcus otitidis; identical to SEQ ID NO: 4285
  CDS (4)..(279)

SEQ ID NO: 4288 - protein, 92 aa, Alloiococcus otitidis
MSKTLISLQLYSSRLFWVSSLTTLPAVSRVVPATSDNWMMVKGYGISTASPCRVPRSSIHKASINSTLSLALETAASWILFSWKNKSSDKLR

SEQ ID NO: 4289 - DNA, 1254 bp, Alloiococcus otitidis
  CDS (28)..(1251)
ttgttaagtagaaaggaagacttgaccatgagtcagaaagcaattcaagtccagtcagaaattggaaggttaaaaaaggtcttgctccaccgaccaggcaaggaattggagaatctgatgccagactatctcgaccgcttactctttgatgatatccccgatttacaaaatgcccaagccgaacacgaccaatttgctaaagtcttgcgacaaaatggtgtccaagttctttacctagaaaaattggtggctgaagccattgaccacgctggagtaagagaaaaatttatccaagactggcttgcggaggctggtattgcttctgacaatgcaaaaaaccaggtcaaagaaattttacatggccttgatacatttgacatggtcctgaaaagcatggaaggctttaaaaaggcggaaattgaccaaggctcttaccagtctttggccgacttgatcgagactgactaccctttcttggtggaccccatgccgaacctctactttacccgggatccttttgctagcatggcaaatggggtgtctgtcaaccacatgtattctgacacccgaaaccgggaaaccctatacggccagtatatttttgactaccacccggaatatggtggcgacaaggtggaccatttttacaatcgatttgaagaaagtcgcttagaaggtggggatgagctcgttttatccaaagacgtcttagctgtcggcatatcgcaacgaaccgcttcccggtctattgaaaaactggctaaaaagctctttcaagctggtgtctttaaagaagttttggcctttttaatcggtaactaccgcaagtttatgcacctggatactgtcttcaccatggtcgattatgacaagtttactatccactccgaaatccaatctggtctccgggtcgtctctttaaaaccaggtaaaaatggccagattcaaatggaagaaaaaaacagccagcaattggacagggttttggccgaagctctcggtttagatgaagtcaccctgatcccttgtgggggaaatgaccctgtggctggggctagagagcagtggaatgacggttccaataccctagccatcgccccgggtgaagtagtggtttatgaccgcaaccgggggaccaatgccttgttagaagaagctggacttaaactccataaaatcaaggccagcgaactggtccgaggacggggaggtccacgttgcatgtctatgcctctctttcgagagaacttatag

SEQ ID NO: 4290 - protein, 408 aa, Alloiococcus otitidis
MSQKAIQVQSEIGRLKKVLLHRPGKELENLMPDYLDRLLFDDIPDLQNAQAEHDQFAKVLRQNGVQVLYLEKLVAEAIDHAGVREKFIQDWLAEAGIASDNAKNQVKEILHGLDTFDMVLKSMEGFKKAEIDQGSYQSLADLIETDYPFLVDPMPNLYFTRDPFASMANGVSVNHMYSDTRNRETLYGQYIFDYHPEYGGDKVDHFYNRFEESRLEGGDELVLSKDVLAVGISQRTASRSIEKLAKKLFQAGVFKEVLAFLIGNYRKFMHLDTVFTMVDYDKFTIHSEIQSGLRVVSLKPGKNGQIQMEEKNSQQLDRVLAEALGLDEVTLIPCGGNDPVAGAREQWNDGSNTLAIAPGEVVVYDRNRGTNALLEEAGLKLHKIKASELVRGRGGPRCMSMPLFRENL

SEQ ID NO: 4291 - DNA, 1254 bp, Alloiococcus otitidis; identical to SEQ ID NO: 4289
  CDS (1)..(1251)

SEQ ID NO: 4292 - protein, 417 aa, Alloiococcus otitidis
MLSRKEDLTMSQKAIQVQSEIGRLKKVLLHRPGKELENLMPDYLDRLLFDDIPDLQNAQAEHDQFAKVLRQNGVQVLYLEKLVAEAIDHAGVREKFIQDWLAEAGIASDNAKNQVKEILHGLDTFDMVLKSMEGFKKAEIDQGSYQSLADLIETDYPFLVDPMPNLYFTRDPFASMANGVSVNHMYSDTRNRETLYGQYIFDYHPEYGGDKVDHFYNRFEESRLEGGDELVLSKDVLAVGISQRTASRSIEKLAKKLFQAGVFKEVLAFLIGNYRKFMHLDTVFTMVDYDKFTIHSEIQSGLRVVSLKPGKNGQIQMEEKNSQQLDRVLAEALGLDEVTLIPCGGNDPVAGAREQWNDGSNTLAIAPGEVVVYDRNRGTNALLEEAGLKLHKIKASELVRGRGGPRCMSMPLFRENL

SEQ ID NO: 4293 - DNA, 1338 bp, Alloiococcus otitidis
  CDS (40)..(1335)
agttttaaaaaagattcgaatagaaagttgaggccaaccatgcccaatcaatttacagattatcattttaagccctttattaatcttgccctggcagatatgggctttgtccataccagggaagttcaagccaaggtaataccggaaatcaaagctgggagagacctggtagtcaaagcccaaactggttcaggcaaaagccacgcctttcttttgcccttgattaatgctattcagccagacaaggatgaagtacaggtggtcatcacagcccccagtcgggagttggctgaccagctctaccaatttagccaggaccttatcaagcctgctggtgaagcggtccggattgaaaattatgttggtgggtctaacaaggaaaaacaggttcaaaaattagaacaaaaacaaccccacctagccatcgggacacctggccggatgctagacatggtcagcaaccacggtcttaatatttatacagcccaatatctggtagtggacgaggcagacatgaccttggacctgggatttcttagggaagtggaccaactggccagtcgggtaggtcaaagcagtcaactattagtcttttctgctaccatccctgacaagctcaagcccttctttaaaaaatacctcaaccagcctaaatttatttatactgaaagccaatctttgattcccgaccaggtcgaaaattggctgatcgcaacgaaaagtaaggaccgggttgatttaatctatgacctcctcaccctaggccaagcctatttagccttaatctttgccaatacccaggaccgagtagaagaaattgcccaggctttggaagagaggggactggactgtgccacactccacggtggattagaagcccgagagagaaagcgggtcatgcgacaaatccgcaatttagactaccaatatgtcgtagccaccgacttggctgccagagggatcgatattgaaggggtttcccatgtcattaatgccgaaatcccaaatgacctggactactttatccaccgggtggggcggactggtcgtaatggcctagcaggactggctgttaccttctatggtcctgacgaaattgaagccgtccaatacctagaagaccgggggataaactttgtagccaaaaccatcaagaaccatgaagtggtggatgataaaaaacatgaccaccgccgggccagaaagcaagtagggaagaaaaagacttatgactctgagatcgctggcatggtgaagaaggctaagaagaaagttaagcccaattacaagaaaaaaattaaccgctacaagcaaagaaaaaaccgccggcgcaagtaa

SEQ ID NO: 4294 - protein, 432 aa, Alloiococcus otitidis
MPNQFTDYHFKPFINLALADMGFVHTREVQAKVIPEIKAGRDLVVKAQTGSGKSHAFLLPLINAIQPDKDEVQVVITAPSRELADQLYQFSQDLIKPAGEAVRIENYVGGSNKEKQVQKLEQKQPHLAIGTPGRMLDMVSNHGLNIYTAQYLVVDEADMTLDLGFLREVDQLASRVGQSSQLLVFSATIPDKLKPFFKKYLNQPKFIYTESQSLIPDQVENWLIATKSKDRVDLIYDLLTLGQAYLALIFANTQDRVEEIAQALEERGLDCATLHGGLEARERKRVMRQIRNLDYQYVVATDLAARGIDIEGVSHVINAEIPNDLDYFIHRVGRTGRNGLAGLAVTFYGPDEIEAVQYLEDRGINFVAKTIKNHEVVDDKKHDHRRARKQVGKKKTYDSEIAGMVKKAKKKVKPNYKKKINRYKQRKNRRRK

SEQ ID NO: 4295 - DNA, 1338 bp, Alloiococcus otitidis; identical to SEQ ID NO: 4293
  CDS (28)..(1335)

SEQ ID NO: 4296 - protein, 436 aa, Alloiococcus otitidis
MRPTMPNQFTDYHFKPFINLALADMGFVHTREVQAKVIPEIKAGRDLVVKAQTGSGKSHAFLLPLINAIQPDKDEVQVVITAPSRELADQLYQFSQDLIKPAGEAVRIENYVGGSNKEKQVQKLEQKQPHLAIGTPGRMLDMVSNHGLNIYTAQYLVVDEADMTLDLGFLREVDQLASRVGQSSQLLVFSATIPDKLKPFFKKYLNQPKFIYTESQSLIPDQVENWLIATKSKDRVDLIYDLLTLGQAYLALIFANTQDRVEEIAQALEERGLDCATLHGGLEARERKRVMRQIRNLDYQYVVATDLAARGIDIEGVSHVINAEIPNDLDYFIHRVGRTGRNGLAGLAVTFYGPDEIEAVQYLEDRGINFVAKTIKNHEVVDDKKHDHRRARKQVGKKKTYDSEIAGMVKKAKKKVKPNYKKKINRYKQRKNRRRK

SEQ ID NO: 4297 - DNA, 381 bp, Alloiococcus otitidis; identical to SEQ ID NO: 4265
  CDS (100)..(378)

SEQ ID NO: 4298 - protein, 93 aa, Alloiococcus otitidis; identical to SEQ ID NO: 4266

SEQ ID NO: 4299 - DNA, 969 bp, Alloiococcus otitidis; identical to SEQ ID NO: 4267
  CDS (28)..(966)

SEQ ID NO: 4300 - protein, 313 aa, Alloiococcus otitidis; identical to SEQ ID NO: 4268

SEQ ID NO: 4301 - DNA, 1440 bp, Alloiococcus otitidis
  CDS (1)..(1437)
atgacattaaacaccaaggtcctggtaaccctctttggtgcaacaggtgacctagctgcaagaaaactttaccctgccctttaccagttatacaagaaaaactacctatccaagcatttcgccttgatcgggacaggtcgaagggtctggtcagacgactactttcggtctgttattaaagattccatcaaagatatggaccaaaataccagcttgcaaactgactttgccaaacacttttactaccggtcccatgatgtgaccaaattggaccagtacccagattttaaggcctattcagaccaaatagccgccaaacacaagatcggtggcaaccgcctctattacctatccatgtctcctcgcttttataaggtgattgttgaaaacctcaaccaacacgctttttttgattgtggtggctttagccggatcattgtcgaaaaacccttcggcgatgaccaatccagtgcggcccaattaaaagccgacctgggccaggtagtcgacttaaatgatattttctttatcgaccactacctaggcaagcctctcgtccaaaacattctcaccatgcgttttgccaaccccctcttcaagggaatttggaacaaggaccatattgacaatatccaaattaccctggccgaaaaagtcggtgtagaagagcggggcagcttttatgacaagactggcgccttaaaagacatggtccaaaaccatatcctccaatgctttagcctcctcaccatggaccaaccagacgctctcactactaaggctattttagaagccaaggtagaagccctagaccggatcgaccttagagacgaccacttgactaagtcaactgtccgggcccaatacgttgctcattccacacctggtgaggaatcctacacacaaaatgacaaggtggcagatgcctccactactgaaacctatgtcgccggccgaatcaatatcctagaaggagacctagctggcattccggtcttctaccggactggtaaaaaattagccagtaaaaagacccggttagacattgtctttaaagaccaaggcccctccctctttgacaacaaccaaaacgttttaacggtctacctagaccctagccggaccatacagctcttaatcaacggcaaggagcgggggaatcccaaagcttttgccagacaacaattagccattgttgccacagatggggccctggcttggcctagcgactatgaaagcctcatctatgatgctttgcatggagaccaggtgaactttgcccagtatgaggaaatcgaagcatcttggaaatatgtagataaagtccaaaagatttggcgggaccaagatcaagccctctatagctatgaagtctactctgatggtcccaaagaagcccaggaactcctggagcaagacggtcactactggatcttttaa

SEQ ID NO: 4302 - protein, 479 aa, Alloiococcus otitidis
MTLNTKVLVTLFGATGDLAARKLYPALYQLYKKNYLSKHFALIGTGRRVWSDDYFRSVIKDSIKDMDQNTSLQTDFAKHFYYRSHDVTKLDQYPDFKAYSDQIAAKHKIGGNRLYYLSMSPRFYKVIVENLNQHAFFDCGGFSRIIVEKPFGDDQSSAAQLKADLGQVVDLNDIFFIDHYLGKPLVQNILTMRFANPLFKGIWNKDHIDNIQITLAEKVGVEERGSFYDKTGALKDMVQNHILQCFSLLTMDQPDALTTKAILEAKVEALDRIDLRDDHLTKSTVRAQYVAHSTPGEESYTQNDKVADASTTETYVAGRINILEGDLAGIPVFYRTGKKLASKKTRLDIVFKDQGPSLFDNNQNVLTVYLDPSRTIQLLINGKERGNPKAFARQQLAIVATDGALAWPSDYESLIYDALHGDQVNFAQYEEIEASWKYVDKVQKIWRDQDQALYSYEVYSDGPKEAQELLEQDGHYWIF

SEQ ID NO: 4303 - DNA, 513 bp, Alloiococcus otitidis
  CDS (4)..(510)
atcatgactaatcatatagttttatacaaaccccttatcccacctaacaccggcaatattgccaggacatgtgcagggaccaataccaagctccacttgattgaacccttaggatttaaaacgacagacaaggcacttaagcgggctggcctggactattggcaggagttagacttaacctaccaccgtaatctccggtcttttttgcaggcgattgatacccgccacttgtacctagtctctaagttcgcctaccatacttatgctgatattgactatagggacacagacaaggactattatttcatttttgggaaagaaaccactggcctgccggaaaaatttatgcacgattatgctgacaagtgtatccggatcccaatggacgatagccatgtccggtccttcaacctgtcgaattcagccaatattgttttatttgaagccttgagacagcaagactttgcaggactggagaaagttcatgcctacccccatgacaagttaaaataa

SEQ ID NO: 4304 - protein, 169 aa, Alloiococcus otitidis
MTNHIVLYKPLIPPNTGNIARTCAGTNTKLHLIEPLGFKTTDKALKRAGLDYWQELDLTYHRNLRSFLQAIDTRHLYLVSKFAYHTYADIDYRDTDKDYYFIFGKETTGLPEKFMHDYADKCIRIPMDDSHVRSFNLSNSANIVLFEALRQQDFAGLEKVHAYPHDKLK

SEQ ID NO: 4305 - DNA, 141 bp, Alloiococcus otitidis
  CDS (1)..(138)
atgatttatgcaacatcctttgtctgtcttggccattttattaagtctggtaaaatagaaaaacgtatcatttcggtcatgcaacagcgaaatgatacgttattaagtcatccatattcatttacttatatcagtatctga

SEQ ID NO: 4306 - protein, 46 aa, Alloiococcus otitidis
MIYATSFVCLGHFIKSGKIEKRIISVMQQRNDTLLSHPYSFTYISI

SEQ ID NO: 4307 - DNA, 357 bp, Alloiococcus otitidis
  CDS (16)..(354)
gtaaggaaaggaagaatgaaaatgaataaagtaactgctagtattgggattgcccttggtgctggagccggctatgtcctagcccacctcctagcccccatgccaggagaggaatttcaagccaagttggacctagaaggtaaaaaattaaaacgtcgagccttactcaaggctgacgatttaattaagcgtctgaattatgccatcggacggcaggtaagcaaggaagaggccagacgattaaatgacctcagacgagatattgaccaggctagtgaccaaacagatgtggcaattggtgctggttatggggatgaacccattattcagttggaagattcggatttaaccgattaa

SEQ ID NO: 4308 - protein, 113 aa, Alloiococcus otitidis
MKMNKVTASIGIALGAGAGYVLAHLLAPMPGEEFQAKLDLEGKKLKRRALLKADDLIKRLNYAIGRQVSKEEARRLNDLRRDIDQASDQTDVAIGAGYGDEPIIQLEDSDLTD

SEQ ID NO: 4309 - DNA, 1269 bp, Alloiococcus otitidis
  CDS (7)..(1266)
gaggttatggtgaccatggaccaagagattgaatatctccaaaagttaaaaaatgaataccaagcatacttaaaagatccggtcaacttaaatattgccagggggattccatccaaggaccagctcgacctgtctcaagacttgcttagcctagacttaagccaggactatatgtcccaagatcaagtcgaccttagaagctatggtggaattgacggggttttagaagcccgaaccttatttgctgaacttttggagacggagatagaagaagttatggtggtcggtaatgccagcttgcaagtgatgtacttaagcctggactactttatgaaccaccaagaccatccttggtcccagcaaggtccggtcaagtttttatgcccagtaccaggctatgaccgccattttgccatgctagattatttgggctatgacatggtgcccgtgcctttgactgggtcagggccagacatggatgtggtagaagacctggtcaaggatgaccctagtatcaaggggatcttctgtgtccctaagtatagcaatccaaccggtgaggtttattcggatgagacgattcaccgcctagtcaaaatggagacagctgcttccgatttcaagattttgtgggacaatgcctacatcgtccaccacttgactgaagaccaggttgaaatccccaacatcctagacctagccaaggaaaaccaggtggctgaccgcccttttatctatacttcgacctctaaaatgactctgccaggagcaggaatagcagccatagcagcttcaaggaacaacctccaagcctttcagaacttcctgtccaagcaactgactagctttgacaagttgaaccaaaaaaggcagaccctgtttttgaaaaacaaggccaatatcttagaccatatggccaaacatgcggctatcttgaaacccaaattcgactatattctaaaccgcttggaagaagccttcccaaaccaccagctccttgactggactaagcccaagggagggtattttatccacttaaccacccaggagggctgtgcccaagaaattgtccaaaagctggcggatattggcctggctgtgacccaggccaatgctacttatcctaagggggacaaccccaaagacaatagtattcggctagccccaacctttgcttccttggaagatttagtcaaggccatggatgctattatcctctgtgttgaattagtaagtttaagtaaggaaaggaagaatgaaaatgaataa

SEQ ID NO: 4310 - protein, 420 aa, Alloiococcus otitidis
MVTMDQEIEYLQKLKNEYQAYLKDPVNLNIARGIPSKDQLDLSQDLLSLDLSQDYMSQDQVDLRSYGGIDGVLEARTLFAELLETEIEEVMVVGNASLQVMYLSLDYFMNHQDHPWSQQGPVKFLCPVPGYDRHFAMLDYLGYDMVPVPLTGSGPDMDVVEDLVKDDPSIKGIFCVPKYSNPTGEVYSDETIHRLVKMETAASDFKILWDNAYIVHHLTEDQVEIPNILDLAKENQVADRPFIYTSTSKMTLPGAGIAAIAASRNNLQAFQNFLSKQLTSFDKLNQKRQTLFLKNKANILDHMAKHAAILKPKFDYILNRLEEAFPNHQLLDWTKPKGGYFIHLTTQEGCAQEIVQKLADIGLAVTQANATYPKGDNPKDNSIRLAPTFASLEDLVKAMDAIILCVELVSLSKERKNENE

SEQ ID NO: 4311 - DNA, 1107 bp, Alloiococcus otitidis
  CDS (241)..(1104)
cattttatgaaaatcggtgcccgtacctttaaaactgctattgctatctttatcgctgtctacattccagtcgccattaacttaccagaattaaccgttttgtccggattggctgttgtagcatcgatccaaccctccgtcaagcgatcttacattaccctaagggaccgggtcctctccaatgccattgggggtctagttgcttacataactgctacccaaattggagtctctcctttcttgatcggcctggcttccttgttcttaattgccctcctccaccaattcaagttagatggggtgatttccctggctgtcatgaccttgatcattgttatggtggaatctggccaggcccccttgtatactgctgtcacccgggtttccgctaccgtcttgggggttatcatcgcctttgtcatcaatacctttgtctggcctcccaagtatgaccacaagttgtttgaattaaccaaccatgtcagcgataatatcatgcgaaatatccggatcgccttacgaaaaaacacccaatacggagttatgaaaaaagacctgaaaactattgaccaagacatcgataccatggaattattctttaaatatattaaagaaggccacatcaaccccttccggatccaaagcaagtattctatttcaagactcttggttgtctaccggcagtttattaaggtaactcggtcagccttaaaactagccctcaccctccagcggtcagaaaatatttttaaccactttgatgaagacttgagactatcagtcagggaaaggattgaagtcttgatgtctgcccacgaacaaatcttacaaaaatggaatggccgggtcctacctgaagaagttaagtttatgaaacacaaacgaagcctacgcaaggaatttatggacagcttttatcatgaagctagcatcgacaacaagctaggtgaagattacatcgatagcaacaccgtctttaaaatcatgtcgtctattttggaatacgaagaaagcctgatccacctcaacaccctagtttctgtttatgttaaaaatcacgccaatgaaagtgacattttagaaaccaactttaacaaacccatctaa

SEQ ID NO: 4312 - protein, 288 aa, Alloiococcus otitidis
MIGLASLFLIALLHQFKLDGVISLAVMTLIIVMVESGQAPLYTAVTRVSATVLGVIIAFVINTFVWPPKYDHKLFELTNHVSDNIMRNIRIALRKNTQYGVMKKDLKTIDQDIDTMELFFKYIKEGHINPFRIQSKYSISRLLVVYRQFIKVTRSALKLALTLQRSENIFNHFDEDLRLSVRERIEVLMSAHEQILQKWNGRVLPEEVKFMKHKRSLRKEFMDSFYHEASIDNKLGEDYIDSNTVFKIMSSILEYEESLIHLNTLVSVYVKNHANESDILETNFNKPI

SEQ ID NO: 4313 - DNA, 1107 bp, Alloiococcus otitidis; identical to SEQ ID NO: 4311
  CDS (7)..(1104)

SEQ ID NO: 4314 - protein, 366 aa, Alloiococcus otitidis
MKIGARTFKTAIAIFIAVYIPVAINLPELTVLSGLAVVASIQPSVKRSYITLRDRVLSNAIGGLVAYITATQIGVSPFLIGLASLFLIALLHQFKLDGVISLAVMTLIIVMVESGQAPLYTAVTRVSATVLGVIIAFVINTFVWPPKYDHKLFELTNHVSDNIMRNIRIALRKNTQYGVMKKDLKTIDQDIDTMELFFKYIKEGHINPFRIQSKYSISRLLVVYRQFIKVTRSALKLALTLQRSENIFNHFDEDLRLSVRERIEVLMSAHEQILQKWNGRVLPEEVKFMKHKRSLRKEFMDSFYHEASIDNKLGEDYIDSNTVFKIMSSILEYEESLIHLNTLVSVYVKNHANESDILETNFNKPI

SEQ ID NO: 4315 - DNA, 585 bp, Alloiococcus otitidis
  CDS (49)..(582)
tgtttattgtgcgactgtaaaacttacagaataaaaggaaggatactgatgcaatttccaagagaaggagatttcatcacaatcaaaagttacaagcatgatgggtcactccaccggatatggcgggataccatggtcttaaaaaccagcgaccattccttaattggttgcaatgaccataccctagtgattgaatcagacggccgaaagtggcggaccagagagcctgccctagtttacttccataaaaattattggtttaatattgtgaccatgattagacaaaagggcatttcttactattgcaacctggcttcgccttttttgatcgatgaagaagggctgaaatatattgattatgacctggatgtcaagattttcccagatggggaaaagcgtctcttggatgtcgatgaatacgaagaccacggtaagaagtgggactatccagacgaaattgactacatcctcaaggaacatgttaaaattctagtttcttggatcaaaaatgaaagaggtcccttttcagaaggctatgttgacctttggtttaaccggtacaagcaactgaccggtaagtactaa

SEQ ID NO: 4316 - protein, 178 aa, Alloiococcus otitidis
MQFPREGDFITIKSYKHDGSLHRIWRDTMVLKTSDHSLIGCNDHTLVIESDGRKWRTREPALVYFHKNYWFNIVTMIRQKGISYYCNLASPFLIDEEGLKYIDYDLDVKIFPDGEKRLLDVDEYEDHGKKWDYPDEIDYILKEHVKILVSWIKNERGPFSEGYVDLWFNRYKQLTGKY

SEQ ID NO: 4317 - DNA, 585 bp, Alloiococcus otitidis; identical to SEQ ID NO: 4315
  CDS (7)..(582)

SEQ ID NO: 4318 - protein, 192 aa, Alloiococcus otitidis
MCDCKTYRIKGRILMQFPREGDFITIKSYKHDGSLHRIWRDTMVLKTSDHSLIGCNDHTLVIESDGRKWRTREPALVYFHKNYWFNIVTMIRQKGISYYCNLASPFLIDEEGLKYIDYDLDVKIFPDGEKRLLDVDEYEDHGKKWDYPDEIDYILKEHVKILVSWIKNERGPFSEGYVDLWFNRYKQLTGKY

SEQ ID NO: 4319 - DNA, 1206 bp, Alloiococcus otitidis
  CDS (181)..(1203)
ggaggacgaagaagactagtggaccggaaagacttagaagaaaagtatggtattgacctctgggatgaccaaacaaggcaagacttccgtgagacccttttggcttggtacgaccaagaaaagagagacctaccttggcggcagaccaaggacccttacaagatctgggtctcagaaatcatgctccagcaaacccaagtagccaccgttatcccttattatgaaaaattcatccaaacttaccctgacatcaagtctttagcagagagcaatgaagatgacctcctccgtctgtggcaaggactcggctattattcaagggcccggaacatgcggcaagctgcccagcaaattatggaagactacgggggtcattttcccaaagaccctaaggagatcaaaaagctcaagggaatcggcccttacaccagtggtgccatcgcttccatggcctttgaccaggctgaaccagctgtggatggtaacttaatgcgggttttagcccgggtctttgaagtagaccttgacgtcaaaaaaccttccaaccgcaaagtctttgaagccctgaccaaggagatcatagatccagaccgtcctggtgacttcaaccaggccatgatggacttgggggcgaccatttcaactcccaagaattataatccagaattatcccccatcaaggaatttgaccagtcctacctgaacgatacctggcgccgttaccccgttgctagttcgaacaaaaaggccaaaaaagaagtttatcttgccttgctggtcaaggataaggatggagactacctggtcgaaaaacgaccagctaagggcctcttagctaacctctggctctttcccttaattaatctggaggacttaaagcaagctagccaggatccagaatcttggcaggtcaagcagggagccttacaggaggtcttagaccaaaaccaagttaaccaggtccaggcttatgtcaaggactactaccacttgcccagtcaatttaaccagcaagtccaaggccaggtaagccacgcctttagccatctcaactggtccatttacttgttggaaggtcaagttgattctggccaagccattcccgaccagtgcgaatggctgagtcccgaccagagagaggcctatgccttcccgaaagtccaggagaagatctgggagacttattttaacccttccttattttaa

SEQ ID NO: 4320 - protein, 341 aa, Alloiococcus otitidis
MLQQTQVATVIPYYEKFIQTYPDIKSLAESNEDDLLRLWQGLGYYSRARNMRQAAQQIMEDYGGHFPKDPKEIKKLKGIGPYTSGAIASMAFDQAEPAVDGNLMRVLARVFEVDLDVKKPSNRKVFEALTKEIIDPDRPGDFNQAMMDLGATISTPKNYNPELSPIKEFDQSYLNDTWRRYPVASSNKKAKKEVYLALLVKDKDGDYLVEKRPAKGLLANLWLFPLINLEDLKQASQDPESWQVKQGALQEVLDQNQVNQVQAYVKDYYHLPSQFNQQVQGQVSHAFSHLNWSIYLLEGQVDSGQAIPDQCEWLSPDQREAYAFPKVQEKIWETYFNPSLF

SEQ ID NO: 4321 - DNA, 1206 bp, Alloiococcus otitidis; identical to SEQ ID NO: 4319
  CDS (100)..(1203)

SEQ ID NO: 4322 - protein, 368 aa, Alloiococcus otitidis
MAWYDQEKRDLPWRQTKDPYKIWVSEIMLQQTQVATVIPYYEKFIQTYPDIKSLAESNEDDLLRLWQGLGYYSRARNMRQAAQQIMEDYGGHFPKDPKEIKKLKGIGPYTSGAIASMAFDQAEPAVDGNLMRVLARVFEVDLDVKKPSNRKVFEALTKEIIDPDRPGDFNQAMMDLGATISTPKNYNPELSPIKEFDQSYLNDTWRRYPVASSNKKAKKEVYLALLVKDKDGDYLVEKRPAKGLLANLWLFPLINLEDLKQASQDPESWQVKQGALQEVLDQNQVNQVQAYVKDYYHLPSQFNQQVQGQVSHAFSHLNWSIYLLEGQVDSGQAIPDQCEWLSPDQREAYAFPKVQEKIWETYFNPSLF

SEQ ID NO: 4323 - DNA, 1206 bp, Alloiococcus otitidis; identical to SEQ ID NO: 4319
  CDS (19)..(1203)

SEQ ID NO: 4324 - protein, 395 aa, Alloiococcus otitidis
MDRKDLEEKYGIDLWDDQTRQDFRETLLAWYDQEKRDLPWRQTKDPYKIWVSEIMLQQTQVATVIPYYEKFIQTYPDIKSLAESNEDDLLRLWQGLGYYSRARNMRQAAQQIMEDYGGHFPKDPKEIKKLKGIGPYTSGAIASMAFDQAEPAVDGNLMRVLARVFEVDLDVKKPSNRKVFEALTKEIIDPDRPGDFNQAMMDLGATISTPKNYNPELSPIKEFDQSYLNDTWRRYPVASSNKKAKKEVYLALLVKDKDGDYLVEKRPAKGLLANLWLFPLINLEDLKQASQDPESWQVKQGALQEVLDQNQVNQVQAYVKDYYHLPSQFNQQVQGQVSHAFSHLNWSIYLLEGQVDSGQAIPDQCEWLSPDQREAYAFPKVQEKIWETYFNPSLF

SEQ ID NO: 4325 - DNA, 999 bp, Alloiococcus otitidis
  CDS (13)..(996)
aggagggagtcgatggataaggataagttaatccggctaggccccagaaagcctgacccagaaaaggggagcccagaccaggaccataaaccgtcaagagcaaaccctgaagataagccagaccaggcaggtgaccaggggccaaaaggggaaactagtcaggctaagctacatgaccaagcaaaaaaccaagaccaggaaagaattattacgaaaatccagccccaaaagaaaaagggccgttataatatctacctagatggagactatgccttccccatcagtgaagggagtttggtgaagcactttttgcgcaaggggatggtggtttcccagtccctgcaaaaagacctggaaaaagaagaccaattttccaaggcctacagccgggccttaaattacctgtcttacgccttgcggactgaaaaacaagtccaagatgaccttgaagacaagggttttagccaagatagccaggcagtgattgccaagctaaaagaccaggccttgattaatgatttagaatatgccaagtcctacatccgaacggcagctaagattaaccgcaagggacctcgattaattcaaaatgaactggtccaaaagggggtaggagaccaggacattgaaacagccatggttgaatacccctaccaagaccaagtggacaatgccagccagctggtggaaaaacaatttaacaagtcccggaacaaatcacaaaggcagcgactagccaaggttaaatcctacctatttaacaaaggctacctcagtcaagtgattgaccaggccttggcggaggttcaaccccaactagaccaggaagaagaataccaggccttaatcaagcaaggggacaaggcttataagcgctaccggaaaaaggctagcggttatgaactaaggcaaaaaatcaaggcctttttattcaataagggcttctccagtgacctaatcaaccagtatcttgagaataaggaggacgaagaagactag

SEQ ID NO: 4326 - protein, 328 aa, Alloiococcus otitidis
MDKDKLIRLGPRKPDPEKGSPDQDHKPSRANPEDKPDQAGDQGPKGETSQAKLHDQAKNQDQERIITKIQPQKKKGRYNIYLDGDYAFPISEGSLVKHFLRKGMVVSQSLQKDLEKEDQFSKAYSRALNYLSYALRTEKQVQDDLEDKGFSQDSQAVIAKLKDQALINDLEYAKSYIRTAAKINRKGPRLIQNELVQKGVGDQDIETAMVEYPYQDQVDNASQLVEKQFNKSRNKSQRQRLAKVKSYLFNKGYLSQVIDQALAEVQPQLDQEEEYQALIKQGDKAYKRYRKKASGYELRQKIKAFLFNKGFSSDLINQYLENKEDEED

SEQ ID NO: 4327 - DNA, 1290 bp, Alloiococcus otitidis
  CDS (34)..(1287)
aagatgttaaaaatttcttggaggaagactatattgagtaaaacaggatttgaagatgtcgtaattgtcggtgttcaaaaagaagaaacagactatgacttccactactccctagacgaacttgaaaatttagtcaacaatgctcatggccgggtagtgggacggataagccaaaaacgggatagtctggaccagaagacctttgtgggcaaggggaagttaaaagagattaaagacctggtggaagctaaagatgcgacttgccttatttttaaccaggaattatcccccagccatgtccgcaatatccaggatttcatcaatgtcaaggttctagaccgaattcaagtcattttagacatttttgccatgcgggcccagtccaaggcgggccggctccaggttgagttagcccagcttaactacctcctgccaaggttagccggtcaaggggagaacttgtcccgactaggtggggggattggtacccgggggccaggtgagacgaagttagaaactgaccggcgtcacatccagaagcagatttctgatatcaaaaaggaactcgtcaagttggctgaccatcgcaagagaagccggcaaaagcgccaggaaagtcagatagtccaaatcggcctgattggctacaccaatgccggcaagtccaccctcctcaataaactgactggtagtcaaagtctggagaaggatatattatttgccaccttagaccctataactcgccaattgaccttgcccagtggcttgcaagtaaccttgaccgatacagtcggctttatcaaagacttgcccacacagttaattgagtcctttaagtcaactctagaagaaagcaggcaagcagatattttgcttcacttggttgatgcttctagccccaaccgtgtgagtcaagaagacacagtagtggccttgctggaagatttggatatggaagatattccaagactaactgtttacaataaaaaggataaactagaccaagcctttacccccttggcttttcccaacctccttatctcagccttagacgaccaggatatcacttaccttaagtccagtattgaaaactttttgatggaccaaattatggccacctaccaagtcgacctaccggccagccggggggatatttactcagccctccaacaaggaaccattgttaaaaaggaaaaatttgacaaaactaaccagtcctataaaattgaaggctatgccaaaaaagactcttactggcagtctttattagaggagggagtcgatggataa

SEQ ID NO: 4328 - protein, 418 aa, Alloiococcus otitidis
MSKTGFEDVVIVGVQKEETDYDFHYSLDELENLVNNAHGRVVGRISQKRDSLDQKTFVGKGKLKEIKDLVEAKDATCLIFNQELSPSHVRNIQDFINVKVLDRIQVILDIFAMRAQSKAGRLQVELAQLNYLLPRLAGQGENLSRLGGGIGTRGPGETKLETDRRHIQKQISDIKKELVKLADHRKRSRQKRQESQIVQIGLIGYTNAGKSTLLNKLTGSQSLEKDILFATLDPITRQLTLPSGLQVTLTDTVGFIKDLPTQLIESFKSTLEESRQADILLHLVDASSPNRVSQEDTVVALLEDLDMEDIPRLTVYNKKDKLDQAFTPLAFPNLLISALDDQDITYLKSSIENFLMDQIMATYQVDLPASRGDIYSALQQGTIVKKEKFDKTNQSYKIEGYAKKDSYWQSLLEEGVDG

SEQ ID NO: 4329 - DNA, 1290 bp, Alloiococcus otitidis; identical to SEQ ID NO: 4327
  CDS (4)..(1287)

SEQ ID NO: 4330 - protein, 428 aa, Alloiococcus otitidis
MLKISWRKTILSKTGFEDVVIVGVQKEETDYDFHYSLDELENLVNNAHGRVVGRISQKRDSLDQKTFVGKGKLKEIKDLVEAKDATCLIFNQELSPSHVRNIQDFINVKVLDRIQVILDIFAMRAQSKAGRLQVELAQLNYLLPRLAGQGENLSRLGGGIGTRGPGETKLETDRRHIQKQISDIKKELVKLADHRKRSRQKRQESQIVQIGLIGYTNAGKSTLLNKLTGSQSLEKDILFATLDPITRQLTLPSGLQVTLTDTVGFIKDLPTQLIESFKSTLEESRQADILLHLVDASSPNRVSQEDTVVALLEDLDMEDIPRLTVYNKKDKLDQAFTPLAFPNLLISALDDQDITYLKSSIENFLMDQIMATYQVDLPASRGDIYSALQQGTIVKKEKFDKTNQSYKIEGYAKKDSYWQSLLEEGVDG

SEQ ID NO: 4331 - DNA, 966 bp, Alloiococcus otitidis
  CDS (19)..(963)
ccatgcaaaggagagaccatgaaggaaaaaattattgttatagttggtcctaccggggttgggaagaccaagttgagcctagaattggcccaagacttggctggcgaaatcattaacggggactccatgcaagtctaccggggcttggatattgggaccggcaaggtgactgaatcagaaaaagccggtattccccaccacctcctggatatcttggaggtccaagaagattactctgtctctgattttcaaagccagggccggatgaagattgaagccgttgcaagtaaaaatcgactccccattatcgttggggggactggcctttacattgaatccttgatttatgatgtcagccacggcaaggatgcccagcctgactacgaataccgggctaaattgcaggacttggctgaccaagaaggacgggaatacatctggcaacttttaaaccgactagatcctaaagctgcagccaagatccatcccaacaacttagtccggaccatccgggcattggaggtctaccatgtaacgggggagacattctctagcttccaggacgaaaaaaagaaggggccagctctctaccaagcctttatcattggcctgaatactgaccggtctaaattgtatgaccggattaataccagggtggaccaaatggtagacaaggggcttttggaagaagtaaaatggctaaaagctaagacgaaagaagatgcccaaagccggcggggaatcggctatagagaagttctgtcctacctagatggggaccagacttttgaagaagccatccgtgacataaagcaaaattctaggcactatgccaaacgtcagctaacctggttccacaaccggaccccagttgacaagtggtatgacttaatccaagacccaggtcaacttgaggaagtaataaaagatgttaaaaatttcttggaggaagactatattgagtaa

SEQ ID NO: 4332 - protein, 315 aa, Alloiococcus otitidis
MKEKIIVIVGPTGVGKTKLSLELAQDLAGEIINGDSMQVYRGLDIGTGKVTESEKAGIPHHLLDILEVQEDYSVSDFQSQGRMKIEAVASKNRLPIIVGGTGLYIESLIYDVSHGKDAQPDYEYRAKLQDLADQEGREYIWQLLNRLDPKAAAKIHPNNLVRTIRALEVYHVTGETFSSFQDEKKKGPALYQAFIIGLNTDRSKLYDRINTRVDQMVDKGLLEEVKWLKAKTKEDAQSRRGIGYREVLSYLDGDQTFEEAIRDIKQNSRHYAKRQLTWFHNRTPVDKWYDLIQDPGQLEEVIKDVKNFLEEDYIE

SEQ ID NO: 4333 - DNA, 1890 bp, Alloiococcus otitidis
  CDS (97)..(1887)
ggaaaaagaaatagaagtggccaagctttaccaagaggacctaagcgactattaccaagacctattggcatcactaggataaaaggagagagacgaatggacaaaacaatttactgcgggaaagtaacagaagattatattgatcaagaaatcagcctgtttggttgggttcacaagagacgggacctgggcggtaagatctttattgacttaagagaccggagtggcctggttcaggtggtctttgatggtgagaaaaacaaagaagccctagcgactgctgaagacattcggaaagaatatgtcattgaagtgactggcaaggtggtctaccgccaggaaggggctagcaacccagacctggcaaccggtaagctagaaatagaagctggtcaagttcatattttaaaccaggccaagaccccaccctttgaaattaatgatgataagtcagtatctgaggaattgcggctcaaataccgttatctcgacctacgccgggaaaagatgacccaaaacctagtcttgcgccaccaggttaaaaaagttttccgtaattacttagaccgaaatgattttatcgatgtcgaaacacctttcttaaccaagtccaccccagaaggagcccgggactacttggtgccttcccgtatctacaatggtaaattttttgccctaccccaatcgccccaactcttcaagcaattgttgatgggggctggcttggaacgttactaccaaattgtccgttgcttccgggatgaggacttacgtggggaccgccaaccggaatttacacaagttgatattgaaacctcctttatggacagccaatccatccaagacttgattgaaggcttgctgaaagagattaccaaagaagtcaaaggcatagagattaaagacgactttccccgcctaacttatgcggaagccatggaccggttcggtagtgataaaccggatatccgctttggcttggaactagaagatgttagtggtatcgtcaaagacagtgactttaaagtcttttcttctgccattgaagcaggaggtttagtcaaagccattaatgccaagggtggagcagaccactatacccgcaagcaaatcgacaagctccaagagactaccgctgtttatggggctaaggggctggcttggctgaaggtcaatgaggatggtttagctggcccaattgccaagttctttaacgacagtccaattggcgaccaagtttgccaaaaactgggggcagagcctggtgacctcctcctatttgtcgctgaccaatggaaggttgtccatgatgctttaggagccctccgcctccagctgggacaggatttgggcttgatcgaccaggatcaactagcctatgtttgggttgtagactggcctttattagagttcgatgaagaagaagggcgctatgtggcagcccaccaccccttcaccatgccggttaaagaagatgtcgataaactagcagatgacccccaatcagtaactgctaatgcctatgatattgtcttaaatggttatgaaatcggaggcgggtctatccgtatccatgaacgtgaattgcaagaaaccatgctcgaggctttaggcttcagccaggaagaagcccaaaagcagtttggcttcttgctagatgccctagactacggcttccctcctcatggtggcattgcctttggtttagaccggcttgtcatgattttagctggtgaagccaatattcgtgaagttatcgccttccctaaaaacaaaaatgccaaagaccctctaaccgatgctccagctttggtatccgaaaaacagttggaagagttaggcttatctgtaacttctattgaccaggaagagtccagtgaggaaaactag

SEQ ID NO: 4334 - protein, 597 aa, Alloiococcus otitidis
MDKTIYCGKVTEDYIDQEISLFGWVHKRRDLGGKIFIDLRDRSGLVQVVFDGEKNKEALATAEDIRKEYVIEVTGKVVYRQEGASNPDLATGKLEIEAGQVHILNQAKTPPFEINDDKSVSEELRLKYRYLDLRREKMTQNLVLRHQVKKVFRNYLDRNDFIDVETPFLTKSTPEGARDYLVPSRIYNGKFFALPQSPQLFKQLLMGAGLERYYQIVRCFRDEDLRGDRQPEFTQVDIETSFMDSQSIQDLIEGLLKEITKEVKGIEIKDDFPRLTYAEAMDRFGSDKPDIRFGLELEDVSGIVKDSDFKVFSSAIEAGGLVKAINAKGGADHYTRKQIDKLQETTAVYGAKGLAWLKVNEDGLAGPIAKFFNDSPIGDQVCQKLGAEPGDLLLFVADQWKVVHDALGALRLQLGQDLGLIDQDQLAYVWVVDWPLLEFDEEEGRYVAAHHPFTMPVKEDVDKLADDPQSVTANAYDIVLNGYEIGGGSIRIHERELQETMLEALGFSQEEAQKQFGFLLDALDYGFPPHGGIAFGLDRLVMILAGEANIREVIAFPKNKNAKDPLTDAPALVSEKQLEELGLSVTSIDQEESSEEN

SEQ ID NO: 4335 - DNA, 1443 bp, Alloiococcus otitidis
  CDS (145)..(1440)
gggaaagtagcgatactttctaaactaaggtggtaccacgtaaatgagcgtcctttcttaaacagtcaatgtttgaggaaggattttttctttgcatttaaaaccactaagcagactgaaaacaatgtgcatgaggaggatggcatgaaatatcaaaagcaaaaggggactagtgacctctttcctgaccagttagacaattggcactatattgaatccctggcccaagatttgatgcaaaaataccgattcaaagaagtcagggttccaatttttgaagacgtggaactttttgcccgaggcgttggggagactagcgatattgtaagcaaggaaatgtatgacttctacgacaagggggaccgccatattgccctgcgacctgaagggacggcaggggtagtccgggcctatgtcgaaaataaaatgtatggtccagaataccacaagccccaaaaatactactatatgggtcctatgttccgctatgaaagaccccaaagtggccggatgcgccagttccaccaattgggggtagaggtttttggaagcaaaaacccagccacggacctggaaaccatggccctagccttggacttgttccaaactattggaatcaagaatttaaaattggttatcaattccctaggttctaaccagtcgcgcaagacttaccgccaagccttgattgactttttagaaccccattatgaccagcttagcccagactccaaaaaccgcctttacaaaaaccctttaagggtcttagacagtaaagatcaaaaagataaggagatcgtccaagatgccccatccatcctggactacttagacgatccctcccttgaccactttcaggaagtcaagcaaggtttagaagatttgggaattgactaccaggtggactccaatatggtccggggactagattattacaatgacacgatttttgaaattatgacggatgaccctaacttcgggtctaatacaactattgcagcaggtggtcgctatgacaagctggtcgaggaagtgggcggtccacaaagcccagcctttggttttgccgtcggtttggaacgtttggtcatgttaattgaccagtctgatattcaactgccgaaccaggaccacttagatatttacatggtcaccatcggccaagctgccaatcgacaggcactcaagctaagccaagtcttgcgtcaggcaggtttacatgttgaaagagaatttatggaccgcaaacctggcaagcagtttaagtcagctgacaagctccaggctgacttggccatgaccctgggagaccatgaaatcgaacagggaacggttacagtcaagcgcttgtcgaccggtaaggaaaaagaaatagaagtggccaagctttaccaagaggacctaagcgactattaccaagacctattggcatcactaggataa

SEQ ID NO: 4336 - protein, 432 aa, Alloiococcus otitidis
MKYQKQKGTSDLFPDQLDNWHYIESLAQDLMQKYRFKEVRVPIFEDVELFARGVGETSDIVSKEMYDFYDKGDRHIALRPEGTAGVVRAYVENKMYGPEYHKPQKYYYMGPMFRYERPQSGRMRQFHQLGVEVFGSKNPATDLETMALALDLFQTIGIKNLKLVINSLGSNQSRKTYRQALIDFLEPHYDQLSPDSKNRLYKNPLRVLDSKDQKDKEIVQDAPSILDYLDDPSLDHFQEVKQGLEDLGIDYQVDSNMVRGLDYYNDTIFEIMTDDPNFGSNTTIAAGGRYDKLVEEVGGPQSPAFGFAVGLERLVMLIDQSDIQLPNQDHLDIYMVTIGQAANRQALKLSQVLRQAGLHVEREFMDRKPGKQFKSADKLQADLAMTLGDHEIEQGTVTVKRLSTGKEKEIEVAKLYQEDLSDYYQDLLASLG

SEQ ID NO: 4337 - DNA, 1443 bp, Alloiococcus otitidis; identical to SEQ ID NO: 4335
  CDS (127)..(1440)

SEQ ID NO: 4338 - protein, 438 aa, Alloiococcus otitidis
MHEEDGMKYQKQKGTSDLFPDQLDNWHYIESLAQDLMQKYRFKEVRVPIFEDVELFARGVGETSDIVSKEMYDFYDKGDRHIALRPEGTAGVVRAYVENKMYGPEYHKPQKYYYMGPMFRYERPQSGRMRQFHQLGVEVFGSKNPATDLETMALALDLFQTIGIKNLKLVINSLGSNQSRKTYRQALIDFLEPHYDQLSPDSKNRLYKNPLRVLDSKDQKDKEIVQDAPSILDYLDDPSLDHFQEVKQGLEDLGIDYQVDSNMVRGLDYYNDTIFEIMTDDPNFGSNTTIAAGGRYDKLVEEVGGPQSPAFGFAVGLERLVMLIDQSDIQLPNQDHLDIYMVTIGQAANRQALKLSQVLRQAGLHVEREFMDRKPGKQFKSADKLQADLAMTLGDHEIEQGTVTVKRLSTGKEKEIEVAKLYQEDLSDYYQDLLASLG

SEQ ID NO: 4339 - DNA, 1443 bp, Alloiococcus otitidis; identical to SEQ ID NO: 4335
  CDS (73)..(1440)

SEQ ID NO: 4340 - protein, 456 aa, Alloiococcus otitidis
MRKDFFFAFKTTKQTENNVHEEDGMKYQKQKGTSDLFPDQLDNWHYIESLAQDLMQKYRFKEVRVPIFEDVELFARGVGETSDIVSKEMYDFYDKGDRHIALRPEGTAGVVRAYVENKMYGPEYHKPQKYYYMGPMFRYERPQSGRMRQFHQLGVEVFGSKNPATDLETMALALDLFQTIGIKNLKLVINSLGSNQSRKTYRQALIDFLEPHYDQLSPDSKNRLYKNPLRVLDSKDQKDKEIVQDAPSILDYLDDPSLDHFQEVKQGLEDLGIDYQVDSNMVRGLDYYNDTIFEIMTDDPNFGSNTTIAAGGRYDKLVEEVGGPQSPAFGFAVGLERLVMLIDQSDIQLPNQDHLDIYMVTIGQAANRQALKLSQVLRQAGLHVEREFMDRKPGKQFKSADKLQADLAMTLGDHEIEQGTVTVKRLSTGKEKEIEVAKLYQEDLSDYYQDLLASLG

SEQ ID NO: 4341 - DNA, 1329 bp, Alloiococcus otitidis
  CDS (121)..(1326)
aggaagggtgccaagatgacccaacttccctctgaattgcgaaaacgattaccaaaaaaacgaacctttttaattatccttatttttattttatgcttgagttttgcttcacttgtggctatggcccaggaaaatactgttattgtcgacagtcagactttaaatatccgccagggccctggcatctcccatgatattattgaccaggctaaagttaatgaccgtttgcaagttattgaccaagaagatgaatggctcaaggtttccttagacggtgaccaagtgggttgggtagccagctggttggtccaccaggctagtcttacttctgaagcccaagtccctgctactgtaaccggggaaacggtcaatatcagaagccaggcttcaacagatggtgacatcttaggccaggtggaaaaaggggaccatgtcagtgttgtccaccaagaaggcaactggtcccagattgtctttgacgaccaagtggcctggctgtctagctactatcttgactttcaagaccaagatgaagaccaagaaggagaaggtcaaagactggttcaagtcaacgatgtggatgccaatgtccgagctgaaccttctagccagtcagaaaaaattgggacagccccagcctaccagacctatccctacctcgatagccaggaaggttggtacaaggtccaatacagtgagaatagggtgggctatattgccgactttttagcagaggaggcaagctcaagtcaagagggccaagctagtcaagttggtattgataacaatattcccatctctcaagctaccattgtcttagatgctggccacggaggcaaggatccaggtgctgtttctggggacacctacgagaaagacctggccttggccaccgcctttaaattacaagaacgcctggcttctgccggagccgatgtcattttaacccggtcagaagatgaatttataccacttgaagatcgggttgaccaatcgatccaggaatatgctgatgtctttgtcagcctccactttgatgcaactgggacccccaactctatgagtgggaccaccacttattatcatgccccaagtgaccaaggcctagctgaatccattagtgctagcctagctgaccaagctagcctacccaacaatggggtccggacggctgactattttgtcttgcgaaacaatccaagaccggccgtccttcttgaactaggctatatggaccatgacagggacttggaaattatcccaaccagccaataccaagaggatgttgcggaagccatctaccaaggactcttagactattttgaataa

SEQ ID NO: 4342 - protein, 402 aa, Alloiococcus otitidis
MAQENTVIVDSQTLNIRQGPGISHDIIDQAKVNDRLQVIDQEDEWLKVSLDGDQVGWVASWLVHQASLTSEAQVPATVTGETVNIRSQASTDGDILGQVEKGDHVSVVHQEGNWSQIVFDDQVAWLSSYYLDFQDQDEDQEGEGQRLVQVNDVDANVRAEPSSQSEKIGTAPAYQTYPYLDSQEGWYKVQYSENRVGYIADFLAEEASSSQEGQASQVGIDNNIPISQATIVLDAGHGGKDPGAVSGDTYEKDLALATAFKLQERLASAGADVILTRSEDEFIPLEDRVDQSIQEYADVFVSLHFDATGTPNSMSGTTTYYHAPSDQGLAESISASLADQASLPNNGVRTADYFVLRNNPRPAVLLELGYMDHDRDLEIIPTSQYQEDVAEAIYQGLLDYFE

SEQ ID NO: 4343 - DNA, 1329 bp, Alloiococcus otitidis; identical to SEQ ID NO: 4341
  CDS (16)..(1326)

SEQ ID NO: 4344 - protein, 437 aa, Alloiococcus otitidis
MTQLPSELRKRLPKKRTFLIILIFILCLSFASLVAMAQENTVIVDSQTLNIRQGPGISHDIIDQAKVNDRLQVIDQEDEWLKVSLDGDQVGWVASWLVHQASLTSEAQVPATVTGETVNIRSQASTDGDILGQVEKGDHVSVVHQEGNWSQIVFDDQVAWLSSYYLDFQDQDEDQEGEGQRLVQVNDVDANVRAEPSSQSEKIGTAPAYQTYPYLDSQEGWYKVQYSENRVGYIADFLAEEASSSQEGQASQVGIDNNIPISQATIVLDAGHGGKDPGAVSGDTYEKDLALATAFKLQERLASAGADVILTRSEDEFIPLEDRVDQSIQEYADVFVSLHFDATGTPNSMSGTTTYYHAPSDQGLAESISASLADQASLPNNGVRTADYFVLRNNPRPAVLLELGYMDHDRDLEIIPTSQYQEDVAEAIYQGLLDYFE

SEQ ID NO: 4345 - DNA, 591 bp, Alloiococcus otitidis
  CDS (139)..(588)
agatatcgccaccgtcaagttggtgatcgggatccaaaacttagccgatttgaaagttattgtcagcaaggtgaaaaaggtacccgatgtctacgctgtcaaacgggtaaccaattaaagagaagtcaggaggatttgatgcgagttcttattcaaagagtgtctaaagccagtgtccggatccaagaagaggttatcggtaaaattgaccaaggctttttagtcttggtcggtgtggaagatgaagatgggccagaagatgtggactacctggttcgcaaggtgagccaaatgcggatttttgaagatgaagcagggaagctcaacctgtccattgaccaggtgggcgggagcattttatctatttcccaatttaccctccatgccaatactaaaaagggcaaccggcccagctttgtccgggcaggccaaccagaccatgccgaaaaactctaccaagaatttaaccaaaaattaaaagaccaaggtctcccagttgagactggccagtttggggcagatatggcggtcagtttagtcaatgatggccccgtgaccatctggctggacagtaagaacaaagaatattaa

SEQ ID NO: 4346 - protein, 150 aa, Alloiococcus otitidis
MRVLIQRVSKASVRIQEEVIGKIDQGFLVLVGVEDEDGPEDVDYLVRKVSQMRIFEDEAGKLNLSIDQVGGSILSISQFTLHANTKKGNRPSFVRAGQPDHAEKLYQEFNQKLKDQGLPVETGQFGADMAVSLVNDGPVTIWLDSKNKEY

SEQ ID NO: 4347 - DNA, 591 bp, Alloiococcus otitidis; identical to SEQ ID NO: 4345
  CDS (136)..(588)

SEQ ID NO: 4348 - protein, 151 aa, Alloiococcus otitidis
MMRVLIQRVSKASVRIQEEVIGKIDQGFLVLVGVEDEDGPEDVDYLVRKVSQMRIFEDEAGKLNLSIDQVGGSILSISQFTLHANTKKGNRPSFVRAGQPDHAEKLYQEFNQKLKDQGLPVETGQFGADMAVSLVNDGPVTIWLDSKNKEY

SEQ ID NO: 4349 - DNA, 2223 bp, Alloiococcus otitidis
  CDS (70)..(2220)
aaggtgttagaaatggctgtgcaaaaaaattactccccccaagaagtctttgtcctctgcttaacctatatgaccagtgaccatgttgcctttgtcaaacgtgcctatgatgtagcagaagaagcccaccaagggcagatgagaaagtccaaagaagaatacattacccacccaatccaggttgctgccatcctagccgaaatcaagatggatccggtaaccgtagcgacaggatttttgcacgatgtcattgaagatacccgatatagctatgatgatatcgccgaaatgtttaatcccaaggtagctgacctagtggacggggtcagtaagctgggtaagtttaagttcaagtccaaagaagaacaccaggccgaaaaccaccgcaaaatgctcttagccatggccaaggatgtccgggtggtcttagtcaagctagcagaccgcctgcataatatgcggaccttgaaataccaccggcctgaaaaacaaagggaaattgccagagaaaccttggaaatctatgcccccttggctgaccgcttgggaattagccgaatcaagtgggagttagaagatacctctctccgctatattaacccccagcaatactatcggattgttcacttaatgaagtcccggcgtgaggatcgggaacgctacattgaaaatgcccaagaattgatccaagaatcagtggatgacttggacattgaagccaatattaccggccggcccaaacacatctactccatttaccggaagatgaaaaaccaaaagaaacaatttggggaaatctacgatctcttagccatccgggttatcgtcccttcaattaaggactgttatgccgtccttggggccatccatacccggtggaaaccaatgcctggccggtttaaagactatatcgccatgcctaaagccaatatgtaccagtccctccacaccaccgtccttggaccagatgccaccccactagaagtccaaattaggacccagcaaatgcacgaggtggctgaatacggggtggctgctcactgggcttacaaggaaggtaagacccagaaggtaaaggaagattctgacaacaagcaattgtcttggttcagagatattattgagcttcaaacggaatctaacaatgccagtgactttatggattccatcaaagaagatatcttccaagacaaggtctatgtctttagtccaaaaggcgatgttatggaactgcctaagaattcttctaccctagactttgcctaccatgtccacaccgaagtagggaacaagtcaaccggtgccaaggtgaatggcaagattgtccctctcaactacaaattaaaaaatggggatattgtggaaatgctgacttcttcaaattcctttggtcctagccgggactggctcaactatgtcaacacatccaaggccagaaaccggatcaaacgtttcttcaagacccagcaaagagaagaaaatattgaactcggccgaaacttgctagagaaggccatcagcaagcatgactttgacccggctgactttatgaccaaggacaacttaagtaagttagctgaacgatataactacaccaatgaagaagacctgttagcagccattggttacaatgaattgaaagaagctaccgtcgcccttcgcttgacccaagaggcaaggaaggaaagggaggaggaagaacagaagctggctgtggactccaatgaagtagagatgtccaaagagccagaaaaaatgaagatccggcacgaagatggggtggtcatcgaaggagcggacaacctcctcatccgcctcagtaagtgctgtaaccctgtaccgggtgatgatattgtaggctacatcacccgtggtcgaggagtttccatccaccgcaaggactgtccaaatatccagcaaggcgaaactgagaccagtcgcctgattgaagtggaatgggaagatgccaaggttgaggataaaatctacaatgcccaattgcagattaccggctacaaccgtaacggcttgatcaatgatattttaaatgtcgctaatgccaattccatccagttacgtaatgtagtgggccgggtcaatgctgaagatatcgccaccgtcaagttggtgatcgggatccaaaacttagccgatttgaaagttattgtcagcaaggtgaaaaaggtacccgatgtctacgctgtcaaacgggtaaccaattaa

SEQ ID NO: 4350 - protein, 717 aa, Alloiococcus otitidis
MTSDHVAFVKRAYDVAEEAHQGQMRKSKEEYITHPIQVAAILAEIKMDPVTVATGFLHDVIEDTRYSYDDIAEMFNPKVADLVDGVSKLGKFKFKSKEEHQAENHRKMLLAMAKDVRVVLVKLADRLHNMRTLKYHRPEKQREIARETLEIYAPLADRLGISRIKWELEDTSLRYINPQQYYRIVHLMKSRREDRERYIENAQELIQESVDDLDIEANITGRPKHIYSIYRKMKNQKKQFGEIYDLLAIRVIVPSIKDCYAVLGAIHTRWKPMPGRFKDYIAMPKANMYQSLHTTVLGPDATPLEVQIRTQQMHEVAEYGVAAHWAYKEGKTQKVKEDSDNKQLSWFRDIIELQTESNNASDFMDSIKEDIFQDKVYVFSPKGDVMELPKNSSTLDFAYHVHTEVGNKSTGAKVNGKIVPLNYKLKNGDIVEMLTSSNSFGPSRDWLNYVNTSKARNRIKRFFKTQQREENIELGRNLLEKAISKHDFDPADFMTKDNLSKLAERYNYTNEEDLLAAIGYNELKEATVALRLTQEARKEREEEEQKLAVDSNEVEMSKEPEKMKIRHEDGVVIEGADNLLIRLSKCCNPVPGDDIVGYITRGRGVSIHRKDCPNIQQGETETSRLIEVEWEDAKVEDKIYNAQLQITGYNRNGLINDILNVANANSIQLRNVVGRVNAEDIATVKLVIGIQNLADLKVIVSKVKKVPDVYAVKRVTN

SEQ ID NO: 4351 - DNA, 2223 bp, Alloiococcus otitidis; identical to SEQ ID NO: 4349
  CDS (13)..(2220)

SEQ ID NO: 4352 - protein, 736 aa, Alloiococcus otitidis
MAVQKNYSPQEVFVLCLTYMTSDHVAFVKRAYDVAEEAHQGQMRKSKEEYITHPIQVAAILAEIKMDPVTVATGFLHDVIEDTRYSYDDIAEMFNPKVADLVDGVSKLGKFKFKSKEEHQAENHRKMLLAMAKDVRVVLVKLADRLHNMRTLKYHRPEKQREIARETLEIYAPLADRLGISRIKWELEDTSLRYINPQQYYRIVHLMKSRREDRERYIENAQELIQESVDDLDIEANITGRPKHIYSIYRKMKNQKKQFGEIYDLLAIRVIVPSIKDCYAVLGAIHTRWKPMPGRFKDYIAMPKANMYQSLHTTVLGPDATPLEVQIRTQQMHEVAEYGVAAHWAYKEGKTQKVKEDSDNKQLSWFRDIIELQTESNNASDFMDSIKEDIFQDKVYVFSPKGDVMELPKNSSTLDFAYHVHTEVGNKSTGAKVNGKIVPLNYKLKNGDIVEMLTSSNSFGPSRDWLNYVNTSKARNRIKRFFKTQQREENIELGRNLLEKAISKHDFDPADFMTKDNLSKLAERYNYTNEEDLLAAIGYNELKEATVALRLTQEARKEREEEEQKLAVDSNEVEMSKEPEKMKIRHEDGVVIEGADNLLIRLSKCCNPVPGDDIVGYITRGRGVSIHRKDCPNIQQGETETSRLIEVEWEDAKVEDKIYNAQLQITGYNRNGLINDILNVANANSIQLRNVVGRVNAEDIATVKLVIGIQNLADLKVIVSKVKKVPDVYAVKRVTN

SEQ ID NO: 4353 - DNA, 2223 bp, Alloiococcus otitidis; identical to SEQ ID NO: 4349
  CDS (4)..(2220)

SEQ ID NO: 4354 - protein, 739 aa, Alloiococcus otitidis
MLEMAVQKNYSPQEVFVLCLTYMTSDHVAFVKRAYDVAEEAHQGQMRKSKEEYITHPIQVAAILAEIKMDPVTVATGFLHDVIEDTRYSYDDIAEMFNPKVADLVDGVSKLGKFKFKSKEEHQAENHRKMLLAMAKDVRVVLVKLADRLHNMRTLKYHRPEKQREIARETLEIYAPLADRLGISRIKWELEDTSLRYINPQQYYRIVHLMKSRREDRERYIENAQELIQESVDDLDIEANITGRPKHIYSIYRKMKNQKKQFGEIYDLLAIRVIVPSIKDCYAVLGAIHTRWKPMPGRFKDYIAMPKANMYQSLHTTVLGPDATPLEVQIRTQQMHEVAEYGVAAHWAYKEGKTQKVKEDSDNKQLSWFRDIIELQTESNNASDFMDSIKEDIFQDKVYVFSPKGDVMELPKNSSTLDFAYHVHTEVGNKSTGAKVNGKIVPLNYKLKNGDIVEMLTSSNSFGPSRDWLNYVNTSKARNRIKRFFKTQQREENIELGRNLLEKAISKHDFDPADFMTKDNLSKLAERYNYTNEEDLLAAIGYNELKEATVALRLTQEARKEREEEEQKLAVDSNEVEMSKEPEKMKIRHEDGVVIEGADNLLIRLSKCCNPVPGDDIVGYITRGRGVSIHRKDCPNIQQGETETSRLIEVEWEDAKVEDKIYNAQLQITGYNRNGLINDILNVANANSIQLRNVVGRVNAEDIATVKLVIGIQNLADLKVIVSKVKKVPDVYAVKRVTN

SEQ ID NO: 4355 - DNA, 669 bp, Alloiococcus otitidis
  CDS (16)..(666)
aaaggagagatcaagatggcagaaaacttagcagcaatcatcgaccacaccttactaaaaccagaagcaagtgaagcagatattcaaaaactttgcttagaagccaaggaccaccagtttaaatccgtttgcattaacccagcatgggtcaagtatgccagcgacttattggctaacacaggtgttgccgtttgtaccgtggtgggctttcccctaggggctaacacaagccaaatcaaggtccaagaagcccactcagctatcaaagacggggccagcgaaatcgacatggttcttaatatcggccggttaaaaagcgaagactttgcctatgtctacgatgacatagcaggtgtggtcaaggcttgtcagggtcaggccttggttaaggtgatcatagaagcttgcttgttggacaaaaacgaaaaggtccgggcctgcgaaattgctaaacgagctggggcagactttgttaagacctcaactggcttctccatcggtggagcgaccgtggaggatgtcaagcttatgcgagccactgtgggacccgacatgggggtcaaagcctctgggggtatccggagcttagaggatgcccaagatatggtccaagctggagcaagccggctgggtgcttctagcggggttgaaattatcagccaatcttag

SEQ ID NO: 4356 - protein, 217 aa, Alloiococcus otitidis
MAENLAAIIDHTLLKPEASEADIQKLCLEAKDHQFKSVCINPAWVKYASDLLANTGVAVCTVVGFPLGANTSQIKVQEAHSAIKDGASEIDMVLNIGRLKSEDFAYVYDDIAGVVKACQGQALVKVIIEACLLDKNEKVRACEIAKRAGADFVKTSTGFSIGGATVEDVKLMRATVGPDMGVKASGGIRSLEDAQDMVQAGASRLGASSGVEIISQS

SEQ ID NO: 4357 - DNA, 1077 bp, Alloiococcus otitidis
  CDS (112)..(1074)
accaggctcttgagacagctaaaagtctcgaccgcttcggccaggacaagttatttatggactttgaaaaacatgaatcactcattaagacatttactgaagggaagcaaaatgacggagtggaacgaatttagcgtatggattaaccgtgaggcagccgatgccgtttccaatattttgttggatctagggtcatctggcctgtccatcaatgaccgccaagactttgccaacttacccgagtatggttttgacggcttgtgggccttagatgagtccaaatttcccgaaggccaggtagtcatcaagggctacttccaccaagaagaccgactagaccgcctcaagcaagagataaaagaccgggtggacaaactgaaggactttgacttagaggtggaaaactatcaggtgcactacgctcaggtcaatgatgaagactgggcggatacctggaaaaaatactaccacccggtggcaatcagccactttataaccattgttcccaagtgggaagactaccaagcccaagatggccgggagatcaccattagcttggacccaggtctagcatttggaacaggaacccaccagaccacccaactctccctccagctcttggaacaatgtgtccgcaaagggcaaacagtggtggacgttggaacggggtctggggtcttaagcattgccagtgcctatatgcaagccggccaggtctatgcctatgacctggatgatattgcagttgcttcagctaaaagtaatattgcccttaacggtttccagaacactatttcaggtcaagctggcgacctcctccaaggagttgacttagaagctgatctggtggtagctaatatcctagctgagatcattgaacccttaatcccccaagccatgcgggtattaaaagagaatgggaaatttatttcctccggcatcatcaaagagaagaaagaccacatcatccaatgcctagatgcggtgggctttgttgtcgaccaagtcaaccagatggacgactgggtagctattttagcccgcaaaccctttgctgacccaggccaggatgattaa

SEQ ID NO: 4358 - protein, 321 aa, Alloiococcus otitidis
MTEWNEFSVWINREAADAVSNILLDLGSSGLSINDRQDFANLPEYGFDGLWALDESKFPEGQVVIKGYFHQEDRLDRLKQEIKDRVDKLKDFDLEVENYQVHYAQVNDEDWADTWKKYYHPVAISHFITIVPKWEDYQAQDGREITISLDPGLAFGTGTHQTTQLSLQLLEQCVRKGQTVVDVGTGSGVLSIASAYMQAGQVYAYDLDDIAVASAKSNIALNGFQNTISGQAGDLLQGVDLEADLVVANILAEIIEPLIPQAMRVLKENGKFISSGIIKEKKDHIIQCLDAVGFVVDQVNQMDDWVAILARKPFADPGQDD

SEQ ID NO: 4359 - DNA, 1077 bp, Alloiococcus otitidis; identical to SEQ ID NO: 4357
  CDS (73)..(1074)

SEQ ID NO: 4360 - protein, 334 aa, Alloiococcus otitidis
MNHSLRHLLKGSKMTEWNEFSVWINREAADAVSNILLDLGSSGLSINDRQDFANLPEYGFDGLWALDESKFPEGQVVIKGYFHQEDRLDRLKQEIKDRVDKLKDFDLEVENYQVHYAQVNDEDWADTWKKYYHPVAISHFITIVPKWEDYQAQDGREITISLDPGLAFGTGTHQTTQLSLQLLEQCVRKGQTVVDVGTGSGVLSIASAYMQAGQVYAYDLDDIAVASAKSNIALNGFQNTISGQAGDLLQGVDLEADLVVANILAEIIEPLIPQAMRVLKENGKFISSGIIKEKKDHIIQCLDAVGFVVDQVNQMDDWVAILARKPFADPGQDD

SEQ ID NO: 4361 - DNA, 1077 bp, Alloiococcus otitidis; identical to SEQ ID NO: 4357
  CDS (10)..(1074)

SEQ ID NO: 4362 - protein, 355 aa, Alloiococcus otitidis
MRQLKVSTASARTSYLWTLKNMNHSLRHLLKGSKMTEWNEFSVWINREAADAVSNILLDLGSSGLSINDRQDFANLPEYGFDGLWALDESKFPEGQVVIKGYFHQEDRLDRLKQEIKDRVDKLKDFDLEVENYQVHYAQVNDEDWADTWKKYYHPVAISHFITIVPKWEDYQAQDGREITISLDPGLAFGTGTHQTTQLSLQLLEQCVRKGQTVVDVGTGSGVLSIASAYMQAGQVYAYDLDDIAVASAKSNIALNGFQNTISGQAGDLLQGVDLEADLVVANILAEIIEPLIPQAMRVLKENGKFISSGIIKEKKDHIIQCLDAVGFVVDQVNQMDDWVAILARKPFADPGQDD

SEQ ID NO: 4363 - DNA, 618 bp, Alloiococcus otitidis
  CDS (100)..(615)
gactcccttgggatatgtggtaaaataagacctgacactgatgcttttataggaggttactttgtgaagcaagatttagcagcatatattggtcatggtttgcgtgatttgaacccctttttccagtggaaggtccaaaacaattccaaccggcaaacagtggaagttttggttagcttccgcattgatttagaggataaagccccgggaatccaagatcaatttgggaccacccttaataccaattacctacagtttgaagatgttattgccttttatgaccccatccaatcggacatccagcctggcaattacttacgggccattccctttgacaacactttgggcatagaccggggtcaggtggatgtgaccttgaaacatttgaaccgagtcctgtcagctgggaaaacagacctacaagactttgtccaagacagccagcgccatgactttcatttgaactgggaccagcacaacttagaccaggctcttgagacagctaaaagtctcgaccgcttcggccaggacaagttatttatggactttgaaaaacatgaatcactcattaagacatttactgaagggaagcaaaatgacggagtggaacgaatttag

SEQ ID NO: 4364 - protein, 172 aa, Alloiococcus otitidis
MRDLNPFFQWKVQNNSNRQTVEVLVSFRIDLEDKAPGIQDQFGTTLNTNYLQFEDVIAFYDPIQSDIQPGNYLRAIPFDNTLGIDRGQVDVTLKHLNRVLSAGKTDLQDFVQDSQRHDFHLNWDQHNLDQALETAKSLDRFGQDKLFMDFEKHESLIKTFTEGKQNDGVERI

SEQ ID NO: 4365 - DNA, 618 bp, Alloiococcus otitidis; identical to SEQ ID NO: 4363
  CDS (64)..(615)

SEQ ID NO: 4366 - protein, 184 aa, Alloiococcus otitidis
MKQDLAAYIGHGLRDLNPFFQWKVQNNSNRQTVEVLVSFRIDLEDKAPGIQDQFGTTLNTNYLQFEDVIAFYDPIQSDIQPGNYLRAIPFDNTLGIDRGQVDVTLKHLNRVLSAGKTDLQDFVQDSQRHDFHLNWDQHNLDQALETAKSLDRFGQDKLFMDFEKHESLIKTFTEGKQNDGVERI

SEQ ID NO: 4367 - DNA, 1344 bp, Alloiococcus otitidis
  CDS (10)..(1341)
gtggtccttatgtatagaaaacaagaagaaattcatatgaactatgataatgagccccggcaggacatcctctgcattgatgttaagagtttttttgctagcgtagaggcggtggaacgcaatctgaacccgctagatgcaaggatctgcgtagtcagccggcccaaccggcaagggggcctcgttttagcctcctcccccctagtcaaggcagaatatggggttaaaacaggcacccgggtttttgacatccctcaaaaggcagatattcaaattgtcgaacctagaatggctctctacctcaagaaaaacttagagatcctaaatatcttccgccagtttgtcagcgaccaggacctccacccctacagtatcgatgaatcctttttaaatgttagccactcccaccgcctcttcgggacgacttaccaaattgcccggaccctccaggataagatctggcaagagatgggcttggtagccaccgtcgggattggtgacaacccccttttagccaaactggccttggaccaccaggctaagaagaaggctattagccactatattgcccactggcgctaccaagacgtccctcatactgtctggaaaattgaggacttggctgacttttggggcattgggtctcggaccaaggccaagctcaataagttggggattgagactgtctacgacctggcccaggcagacctggccaagctcaaagaccggttcggtattatcggccagcaactcttcttccatgctcacgggattgaccggactcaactttccgaccactacacaccccagtcttcttcttactcccgaaatcaaattttacaaaaagactataccgacccctatgagattaaagtagtcatccgagaaatgggggaagaaaacgccatgcgcctgcgcaagcaccaacaaacagcaggcttggttaagctgacgattggctattccaaagatattctggcagccggctttagccaccaggttactatcgaagcgaccgactcgtccaaaaaattacaggactacctggtccatatttttgaccagtattatgactaccaaccagtccgggtggtcaatgtcactttcggccagattgctcccaagcaaggggtccaactcagcttatttgaagataatcaagaccaagtccgggaggagaagaaaatggccgtcattgaccatattaaaagtcgctttggcaataccgctatcctgccagccaatagcctgctagacggtagcatggctatctaccgggacagcttggtcggtggccaccgggcaggtgacaattcagaaaagccaggaagtgaaggtcactaa

SEQ ID NO: 4368 - protein, 444 aa, Alloiococcus otitidis
MYRKQEEIHMNYDNEPRQDILCIDVKSFFASVEAVERNLNPLDARICVVSRPNRQGGLVLASSPLVKAEYGVKTGTRVFDIPQKADIQIVEPRMALYLKKNLEILNIFRQFVSDQDLHPYSIDESFLNVSHSHRLFGTTYQIARTLQDKIWQEMGLVATVGIGDNPLLAKLALDHQAKKKAISHYIAHWRYQDVPHTVWKIEDLADFWGIGSRTKAKLNKLGIETVYDLAQADLAKLKDRFGIIGQQLFFHAHGIDRTQLSDHYTPQSSSYSRNQILQKDYTDPYEIKVVIREMGEENAMRLRKHQQTAGLVKLTIGYSKDILAAGFSHQVTIEATDSSKKLQDYLVHIFDQYYDYQPVRVVNVTFGQIAPKQGVQLSLFEDNQDQVREEKKMAVIDHIKSRFGNTAILPANSLLDGSMAIYRDSLVGGHRAGDNSEKPGSEGH

SEQ ID NO: 4369 - DNA, 1344 bp, Alloiococcus otitidis; identical to SEQ ID NO: 4367
  CDS (1)..(1341)

SEQ ID NO: 4370 - protein, 447 aa, Alloiococcus otitidis
MVLMYRKQEEIHMNYDNEPRQDILCIDVKSFFASVEAVERNLNPLDARICVVSRPNRQGGLVLASSPLVKAEYGVKTGTRVFDIPQKADIQIVEPRMALYLKKNLEILNIFRQFVSDQDLHPYSIDESFLNVSHSHRLFGTTYQIARTLQDKIWQEMGLVATVGIGDNPLLAKLALDHQAKKKAISHYIAHWRYQDVPHTVWKIEDLADFWGIGSRTKAKLNKLGIETVYDLAQADLAKLKDRFGIIGQQLFFHAHGIDRTQLSDHYTPQSSSYSRNQILQKDYTDPYEIKVVIREMGEENAMRLRKHQQTAGLVKLTIGYSKDILAAGFSHQVTIEATDSSKKLQDYLVHIFDQYYDYQPVRVVNVTFGQIAPKQGVQLSLFEDNQDQVREEKKMAVIDHIKSRFGNTAILPANSLLDGSMAIYRDSLVGGHRAGDNSEKPGSEGH

SEQ ID NO: 4371 - DNA, 453 bp, Alloiococcus otitidis
  CDS (28)..(450)
ggactaagtttgaaaggaggaaggaagatggcccaccacgacaatggcaaggtctactacaccccagatgaactgggctaccaggaccggggcaagttgaaatggatggggatgatgctgtcagaccacaccgaagccctccagcaagtcaaaaaaactgacaagtccttagctagtcaaaaaatttatgaccagcaagacttgccagaaatcagtcaatatttatatgaggcctttatcgaccaaaaaccggtttggatccaggccaacaccatccaaagggaccgccactaccctagcctcccctatatggtaaagggctataaggacaactttatttacctagccaacccagttggacaaaaaagcaagtgccaactggatgatatccgccatattgaatggatggaccccttagactggtaccaaaaaccaggatcccaagctccttaa

SEQ ID NO: 4372 - protein, 141 aa, Alloiococcus otitidis
MAHHDNGKVYYTPDELGYQDRGKLKWMGMMLSDHTEALQQVKKTDKSLASQKIYDQQDLPEISQYLYEAFIDQKPVWIQANTIQRDRHYPSLPYMVKGYKDNFIYLANPVGQKSKCQLDDIRHIEWMDPLDWYQKPGSQAP

SEQ ID NO: 4373 - DNA, 453 bp, Alloiococcus otitidis; identical to SEQ ID NO: 4371
  CDS (10)..(450)

SEQ ID NO: 4374 - protein, 147 aa, Alloiococcus otitidis
MKGGRKMAHHDNGKVYYTPDELGYQDRGKLKWMGMMLSDHTEALQQVKKTDKSLASQKIYDQQDLPEISQYLYEAFIDQKPVWIQANTIQRDRHYPSLPYMVKGYKDNFIYLANPVGQKSKCQLDDIRHIEWMDPLDWYQKPGSQAP

SEQ ID NO: 4375 - DNA, 747 bp, Alloiococcus otitidis
  CDS (16)..(744)
ctaggaggtaaagcaatggatgaaaaagtccaacaattacaagctatgatcgattcatctgaccggattgtcttcttcggtggggcaggggtgtcaaccgccagtggcatcccagacttccgttcttctgagggcttatacatgcaggagtcaggctacagtgtgccggctgaagaaattatttcagaccgtttttttgccaaccaccccaaggaattttttgacttttattttaagaacttggtctttgaaggtgcccagcccaactatgcccacacctatatcgccgacttagagaagaggggcaagtcggtggctgtggtgacccaaaacattgatggccttcacgaaaaagcaggtagccaggaggtttacaagttgcacgggtctaccctagataattactgcctggactgccagcagtattacggctattcagacctccagctagaccaggagggggtaccccattgtcccaaagacggggctattgtccgacctgacattgtcttatatggcgaacaactcgatttatctaccctccaagcagccatctaccaaatttcccaggctgacttattaatcatactcgggacctcactggtggtttatccagcagctggcttggtggactacttccaaggtgacaagctagctgtagttaataaaacaaccatccatcctagacggacagatggtttaatcatccaagaagatattaacaaggtctttaaacagttgacctaa

SEQ ID NO: 4376 - protein, 243 aa, Alloiococcus otitidis
MDEKVQQLQAMIDSSDRIVFFGGAGVSTASGIPDFRSSEGLYMQESGYSVPAEEIISDRFFANHPKEFFDFYFKNLVFEGAQPNYAHTYIADLEKRGKSVAVVTQNIDGLHEKAGSQEVYKLHGSTLDNYCLDCQQYYGYSDLQLDQEGVPHCPKDGAIVRPDIVLYGEQLDLSTLQAAIYQISQADLLIILGTSLVVYPAAGLVDYFQGDKLAVVNKTTIHPRRTDGLIIQEDINKVFKQLT

SEQ ID NO: 4377 - DNA, 705 bp, Alloiococcus otitidis
  CDS (25)..(702)
gaagactatagaggaggttcaagtatgagaattatgatcattgaggatgatcaagttatccgcagacttttggccaagcaaatcttatcttggggctatgaaatttttacttgtcaaaatttcactgatattatgcaagaatttgaccagatcaacccccatttagtcctgttggatatcaatctccccagttataatggttattattggtgtcaggaaattcgtcaaagctccaaagtccccattatctttatcagttcccgcagtgataacatggaccaaatcatggctatgcaaatgggagctgatgactttgtcgttaagccttttgatatcccccttcttatcactaaaatacaagcgcttttgagacggacctatgattttcaaataaaccagtcaacccaagtaatcttgcatgggattagcttaaatttaggaaagagtcaacttgaaagcaagagtagtaaggtggatttaaccaagaccgaattagtgatcttgtaccagctctttcaaaaccaccccaactaccttagtcgggaatctctgatggaagcttgctggcaaggagatgactacattgacgaaaataccctttctgtcaacatatcccgcttgcgcaaaaaattaaagaaattgggggcagagtcttttatccaaaccaagaaaaatgtgggctaccgaattaaggaggagggctaa

SEQ ID NO: 4378 - protein, 226 aa, Alloiococcus otitidis
MRIMIIEDDQVIRRLLAKQILSWGYEIFTCQNFTDIMQEFDQINPHLVLLDINLPSYNGYYWCQEIRQSSKVPIIFISSRSDNMDQIMAMQMGADDFVVKPFDIPLLITKIQALLRRTYDFQINQSTQVILHGISLNLGKSQLESKSSKVDLTKTELVILYQLFQNHPNYLSRESLMEACWQGDDYIDENTLSVNISRLRKKLKKLGAESFIQTKKNVGYRIKEEG

SEQ ID NO: 4379 - DNA, 705 bp, Alloiococcus otitidis
  CDS (13)..(702)
ggaggagggctaatgggatctttcctaaagcgagaaagtttatcattaagtatcttaactcttagtatactggtttttggactcgtttactggctcctaaacctacccatttacggctttttgctagccactagcttaatcatattcctaagcctagtccttttcggggtcaaatatagtcagtatcaaaaggaggaaaaactaaaaaaggcttaccaagagctagaccaagcctacaagcagttaaaaaacattcaatctcaagactatcaaaagctagaagactatttcattttgtggatccaccaaatcaaaacacccctaacagcagccaaactcctagcaagagatcaaaagttaagagagttggaccccctccttttagaaatagaaaattatagccaattagccatgagtttcctaaaattaaacaagcctgaaacagacttaaatattgcctgtgttagtctggatgaccttatgaagccattgctaagaaagtactccagtcaatttatccagacgaaaacaaaattaatttaccaacctatattaaagaaggtgatcaccgatgccaattggtctcaattaatgattgagcaagtcttgaacaacgctttgaaatatgcggcaggcacttccgtccatatttattttgaagacaaaagtctctttattgaagatagggggggtggggatcagtga

SEQ ID NO: 4380 - protein, 230 aa, Alloiococcus otitidis
MGSFLKRESLSLSILTLSILVFGLVYWLLNLPIYGFLLATSLIIFLSLVLFGVKYSQYQKEEKLKKAYQELDQAYKQLKNIQSQDYQKLEDYFILWIHQIKTPLTAAKLLARDQKLRELDPLLLEIENYSQLAMSFLKLNKPETDLNIACVSLDDLMKPLLRKYSSQFIQTKTKLIYQPILKKVITDANWSQLMIEQVLNNALKYAAGTSVHIYFEDKSLFIEDRGGGDQ

SEQ ID NO: 4381 - DNA, 282 bp, Alloiococcus otitidis
  CDS (55)..(279)
aatatgcggcaggcacttccgtccatatttattttgaagacaaaagtctctttattgaagatagggggggtggggatcagtgaagtagacttacctaaaatatttgacaagggttattccggctttaatggcaaattgaaccaaaagtcaactggcctgggcctctttattgtccaaagcattagtcgccggctcaaccaccccattcaagttgagtcaaacataggccaaggcagtcgttttcagatcgaattcccagaccagccccaagccaatttctaa

SEQ ID NO: 4382 - protein, 75 aa, Alloiococcus otitidis
MKIGGVGISEVDLPKIFDKGYSGFNGKLNQKSTGLGLFIVQSISRRLNHPIQVESNIGQGSRFQIEFPDQPQANF

SEQ ID NO: 4383 - DNA, 765 bp, Alloiococcus otitidis
  CDS (16)..(762)
aaagaaggagccaaaatgctactgcaagttaatcatttgaagaaagtttatggtagccagtcgcaacaaacccaagccctaaagtccatccaatttggtgtcaaagaaggagaatttgtcgctatcatgggggaatccggttcgggcaagtctaccttattaaatattatagccaccctggaccaggccactgaaggtcaagtcctaattaataacctagataccagtcagtttaatgaaagtcaactagctcaattccggcgcgaacgcttaggctttgttttccaagattttaacctcttggatagctcaagtaaccaagataatatcctcctgcccctagtcttatccaatacccggcctaaagatatgaaaaataaactcaaagctctagtcccatcgctcggcattactaacctgctagacaagtatccctaccaaatttcaggtggtcagaaacaacgggtagccattggacgtgccttgatcagccagcccgatttaattctagccgatgagccaacgggagctttggattcaaagtcatcgcaaatgattatggagctcttccaaaagattaatggtgccggccaaaccatcttaatggtgacccactcgcttcggtcagctgcttatgctaagcgagtcctcttcatcaaagacgggattgtttaccatgaaatttaccggtcaaatcaaggcttgcagaccttccaagaccgaattgctgactctttagcagtcgtcaatagtcggggtgaataa

SEQ ID NO: 4384 - protein, 249 aa, Alloiococcus otitidis
MLLQVNHLKKVYGSQSQQTQALKSIQFGVKEGEFVAIMGESGSGKSTLLNIIATLDQATEGQVLINNLDTSQFNESQLAQFRRERLGFVFQDFNLLDSSSNQDNILLPLVLSNTRPKDMKNKLKALVPSLGITNLLDKYPYQISGGQKQRVAIGRALISQPDLILADEPTGALDSKSSQMIMELFQKINGAGQTILMVTHSLRSAAYAKRVLFIKDGIVYHEIYRSNQGLQTFQDRIADSLAVVNSRGE

SEQ ID NO: 4385 - DNA, 2016 bp, Alloiococcus otitidis
  CDS (853)..(2013)
cagtcgtcaatagtcggggtgaataaaatgaaaaataaaatattgcgacagcttagctggcaaaatttgaaagcccaccgtcaaaccctagtcccctttgtcctatcttcggctatcttatccggtttactctatttgatcatttccttagtcaacaacgattatgttatccgccgccatgaagtcttgcagacccttatggttatggcgggggtcctaaccacaatatttactgccatatttatcatttatgccagtctctttatctacaaacagcggcataaagagataggcttattcagtgttttaggtatgagcaagaagcatattcaaaagatgacccggctagaattgctcattcaatggctactgaccttagtcttagctatcccgggtggttacctctttggtcatttggttttcatcttcctcaaccgcttaatgcaagacactggtttccaatacatgaactatccttttgatttaaccgccatgctagctgtcattatcattacgggccttatctttttaactgtctatggcatccaccactttaaagtccaagtagctaatcctattcagctgattcaagaagccaaggctagtggaaaggagcccaacaacaacttcttagcccttattgtaggccttataatggttggcttcggttattatttggccatgactagtgctggcttagtccagtctctctaccgtatttttgttgctgtcctgctagtcattgtaggctcttacttcttactaggctctttaagtatttttatcctaaaaggcttaaagaataatgattcttattactataaggcagaaaacttcctatctctatctgggatgctttaccggatgaaggctagcgccattagcttaaccagtattagtattttatgtaccggcttaatgattatgcttggtatgaccctcactgcctaccggggaatggaagaccaggttgaccaggccctagaagctgactatcacgtctcctattataattttgataaccaagaccaaaaagactttaatggtatagtggacaatattgtagctgacttaaaccaagagctagcaattgaatctgttcggacttattgttctagtcagatttttttcgaactaaagggcagagaatttcgacccctcgatatagataagagctctccccaaaatgcagggcaagccaatatatttagacaagaagattttaatgcagccttcgatgaaaatatccaggtcaataaccagcaaattggcctggtagctaatgctgagcgttggaatcaatttgaccaggtaatcttcgcaggccaaagctatgaagtcgtccccctccccgatcatggaatgggcaatattgccattgactttatgcagattgtcctcccgcccaatttatcctttgaagcagcaagtcaagcctaccctagatatgccctagatgaccaagaaccccttccccttgtagtgggccagcacgccaatattgacgggcaaagtgaccaagctgaccaagcaggcatagaagaaagcctagctaacttacaagctaggtatggtgttgacattaccagtcgttttggagcaagtcagatcatttatgctgttaacggtggggcccttttcttgggaatcctcgtcagtgtagttcttttagtaggggtcttccttataatctacttcaagcaaatctcagagggccaacaggacagggataattaccaaattatgcaggctgttggcttaggtcagcaaactattaaaaaagccattaacaaacaaattatatggttatttctcctccccttgttggttgcgatcacccatatggctgtctcttccactattatctttaatatcttaggcctgattaatgttcgagattgggggcaatttatcactagctacctgctggttatcgtcttctttagcctggtttatggcttcatctactggctaacttcacggacttactatcaaatcgtgagtcaatccaagtaa

SEQ ID NO: 4386 - protein, 387 aa, Alloiococcus otitidis
MLYRMKASAISLTSISILCTGLMIMLGMTLTAYRGMEDQVDQALEADYHVSYYNFDNQDQKDFNGIVDNIVADLNQELAIESVRTYCSSQIFFELKGREFRPLDIDKSSPQNAGQANIFRQEDFNAAFDENIQVNNQQIGLVANAERWNQFDQVIFAGQSYEVVPLPDHGMGNIAIDFMQIVLPPNLSFEAASQAYPRYALDDQEPLPLVVGQHANIDGQSDQADQAGIEESLANLQARYGVDITSRFGASQIIYAVNGGALFLGILVSVVLLVGVFLIIYFKQISEGQQDRDNYQIMQAVGLGQQTIKKAINKQIIWLFLLPLLVAITHMAVSSTIIFNILGLINVRDWGQFITSYLLVIVFFSLVYGFIYWLTSRTYYQIVSQSK

SEQ ID NO: 4387 - DNA, 2016 bp, Alloiococcus otitidis; identical to SEQ ID NO: 4385
  CDS (199)..(2013)

SEQ ID NO: 4388 - protein, 605 aa, Alloiococcus otitidis
MVMAGVLTTIFTAIFIIYASLFIYKQRHKEIGLFSVLGMSKKHIQKMTRLELLIQWLLTLVLAIPGGYLFGHLVFIFLNRLMQDTGFQYMNYPFDLTAMLAVIIITGLIFLTVYGIHHFKVQVANPIQLIQEAKASGKEPNNNFLALIVGLIMVGFGYYLAMTSAGLVQSLYRIFVAVLLVIVGSYFLLGSLSIFILKGLKNNDSYYYKAENFLSLSGMLYRMKASAISLTSISILCTGLMIMLGMTLTAYRGMEDQVDQALEADYHVSYYNFDNQDQKDFNGIVDNIVADLNQELAIESVRTYCSSQIFFELKGREFRPLDIDKSSPQNAGQANIFRQEDFNAAFDENIQVNNQQIGLVANAERWNQFDQVIFAGQSYEVVPLPDHGMGNIAIDFMQIVLPPNLSFEAASQAYPRYALDDQEPLPLVVGQHANIDGQSDQADQAGIEESLANLQARYGVDITSRFGASQIIYAVNGGALFLGILVSVVLLVGVFLIIYFKQISEGQQDRDNYQIMQAVGLGQQTIKKAINKQIIWLFLLPLLVAITHMAVSSTIIFNILGLINVRDWGQFITSYLLVIVFFSLVYGFIYWLTSRTYYQIVSQSK

SEQ ID NO: 4389 - DNA, 2016 bp, Alloiococcus otitidis; identical to SEQ ID NO: 4385
  CDS (28)..(2013)

SEQ ID NO: 4390 - protein, 662 aa, Alloiococcus otitidis
MKNKILRQLSWQNLKAHRQTLVPFVLSSAILSGLLYLIISLVNNDYVIRRHEVLQTLMVMAGVLTTIFTAIFIIYASLFIYKQRHKEIGLFSVLGMSKKHIQKMTRLELLIQWLLTLVLAIPGGYLFGHLVFIFLNRLMQDTGFQYMNYPFDLTAMLAVIIITGLIFLTVYGIHHFKVQVANPIQLIQEAKASGKEPNNNFLALIVGLIMVGFGYYLAMTSAGLVQSLYRIFVAVLLVIVGSYFLLGSLSIFILKGLKNNDSYYYKAENFLSLSGMLYRMKASAISLTSISILCTGLMIMLGMTLTAYRGMEDQVDQALEADYHVSYYNFDNQDQKDFNGIVDNIVADLNQELAIESVRTYCSSQIFFELKGREFRPLDIDKSSPQNAGQANIFRQEDFNAAFDENIQVNNQQIGLVANAERWNQFDQVIFAGQSYEVVPLPDHGMGNIAIDFMQIVLPPNLSFEAASQAYPRYALDDQEPLPLVVGQHANIDGQSDQADQAGIEESLANLQARYGVDITSRFGASQIIYAVNGGALFLGILVSVVLLVGVFLIIYFKQISEGQQDRDNYQIMQAVGLGQQTIKKAINKQIIWLFLLPLLVAITHMAVSSTIIFNILGLINVRDWGQFITSYLLVIVFFSLVYGFIYWLTSRTYYQIVSQSK

SEQ ID NO: 4391 - DNA, 2016 bp, Alloiococcus otitidis; identical to SEQ ID NO: 4385
  CDS (19)..(2013)

SEQ ID NO: 4392 - protein, 665 aa, Alloiococcus otitidis
MNKMKNKILRQLSWQNLKAHRQTLVPFVLSSAILSGLLYLIISLVNNDYVIRRHEVLQTLMVMAGVLTTIFTAIFIIYASLFIYKQRHKEIGLFSVLGMSKKHIQKMTRLELLIQWLLTLVLAIPGGYLFGHLVFIFLNRLMQDTGFQYMNYPFDLTAMLAVIIITGLIFLTVYGIHHFKVQVANPIQLIQEAKASGKEPNNNFLALIVGLIMVGFGYYLAMTSAGLVQSLYRIFVAVLLVIVGSYFLLGSLSIFILKGLKNNDSYYYKAENFLSLSGMLYRMKASAISLTSISILCTGLMIMLGMTLTAYRGMEDQVDQALEADYHVSYYNFDNQDQKDFNGIVDNIVADLNQELAIESVRTYCSSQIFFELKGREFRPLDIDKSSPQNAGQANIFRQEDFNAAFDENIQVNNQQIGLVANAERWNQFDQVIFAGQSYEVVPLPDHGMGNIAIDFMQIVLPPNLSFEAASQAYPRYALDDQEPLPLVVGQHANIDGQSDQADQAGIEESLANLQARYGVDITSRFGASQIIYAVNGGALFLGILVSVVLLVGVFLIIYFKQISEGQQDRDNYQIMQAVGLGQQTIKKAINKQIIWLFLLPLLVAITHMAVSSTIIFNILGLINVRDWGQFITSYLLVIVFFSLVYGFIYWLTSRTYYQIVSQSK

SEQ ID NO: 4393 - DNA, 1845 bp, Alloiococcus otitidis
  CDS (22)..(1842)
tgtctagaaaaggggaatgacatggacaaagaccaagcgcgaaaacgtcaaaaaaacatccgtaacttttccattattgcccatatcgaccatgggaaatccactctggctgaccggattctacaagtcactgaaacggttgctgaaagagaaatgcaagaccagctcctggattcaatggacttggagagggaacgtggcattaccattaaattaaacacagtggagttgaaataccaggccaaggacgatcaagaatacaccttccacctcattgacacacctggccacgtcgactttacctatgaagtttcccggagtctggcagcttgtgaaggggcaattttggtcgtcgatgctgcccaaggggtggaggcccaaaccctggccaatgtttacttggccttggacaatgacttagagatcttacctgtaattaataaaattgacctcccggctgctgacccagaccgagttggacaagaaattgaagatattattggtttagactcaagccaggccgttcgcgccagtgccaagtcagggattggaattgaagaaatcctagaaaaaatagtgacagacctgccagccccaagtggcgatattgacaacccccttaaggctatgatctttgattccatttatgattcctaccggggcgttgtcttgagcgttcgaatcgtagaaggtagcgtaaaaaaaggcgaccgaattaaattaatgaacagtggcaagacttatgaggtgtctgaactggggattttctcccccaaacccattgaaagagattatttaatggtaggcgatgttggctatatcacggccaatataaagtcagtccgggatgcccgggttggggataccattaccttggaagacagaccgactgaccaagccttgccaggttaccgccagatgaatccaatggtttactgcgggatgtacccgaccgattcaagtgattacgaagacttgcgggaggccttagagcgcctccagttaaatgattcatctcttcaatttgaagcagaaacctcccaggcccttggatttggcttccgctgtggcttcttaggcatgctccacatggatgttatccaggaacgcttggagcgggagtttgacctagacttgatcacaacagctccgtcagttatctaccatgtcaataaaacagacggccagcaagtggaagtttctaacccatctgagatgcccgatgctggcgaagttgaatccattgaagagccctacgtgaaagccactattactgtgccaaatgactatgtaggacctgtcatggagatctgccagcgcaaaaggggagactttatcaccatggaatacctggacgatatccgggtcaatgtgatttattctattcccttgtctgagatagtttttgacttctttgacaggctcaagtccatgaccaagggttatgcttccctggactatgaagaagacggctacaaggtcagtgacttggttaaaatggatatcttgatccacggcgacccggtcgatgccttgagctttatcgtacacaaggacttttcctatgaacggggtcgggctatagcagaccagttgaaagccaaaattccccgccaacaatttgaaatccccattcaagctgcagtgggcaacaatgttattgcccggtccactgtcaaggcctaccgtaaggatgtcaccgccaagttatatggtggggacgtgacccggcggcaaaaactcttgaaaaaacaaaaagaaggtaaaaaacggatgaaaagtgtggggaatgttgacatcccccaagaagcctttatggccgttttggacttggatgaagactag

SEQ ID NO: 4394 - protein, 607 aa, Alloiococcus otitidis
MDKDQARKRQKNIRNFSIIAHIDHGKSTLADRILQVTETVAEREMQDQLLDSMDLERERGITIKLNTVELKYQAKDDQEYTFHLIDTPGHVDFTYEVSRSLAACEGAILVVDAAQGVEAQTLANVYLALDNDLEILPVINKIDLPAADPDRVGQEIEDIIGLDSSQAVRASAKSGIGIEEILEKIVTDLPAPSGDIDNPLKAMIFDSIYDSYRGVVLSVRIVEGSVKKGDRIKLMNSGKTYEVSELGIFSPKPIERDYLMVGDVGYITANIKSVRDARVGDTITLEDRPTDQALPGYRQMNPMVYCGMYPTDSSDYEDLREALERLQLNDSSLQFEAETSQALGFGFRCGFLGMLHMDVIQERLEREFDLDLITTAPSVIYHVNKTDGQQVEVSNPSEMPDAGEVESIEEPYVKATITVPNDYVGPVMEICQRKRGDFITMEYLDDIRVNVIYSIPLSEIVFDFFDRLKSMTKGYASLDYEEDGYKVSDLVKMDILIHGDPVDALSFIVHKDFSYERGRAIADQLKAKIPRQQFEIPIQAAVGNNVIARSTVKAYRKDVTAKLYGGDVTRRQKLLKKQKEGKKRMKSVGNVDIPQEAFMAVLDLDED

SEQ ID NO: 4395 - DNA, 555 bp, Alloiococcus otitidis
  CDS (70)..(552)
cttggcggtgacatccttacggtaggccttgacagtggaccgggcaataacattgttgcccactgcagcttgaatggggatttcaaattgttggcggggaattttggctttcaactggtctgctatagcccgaccccgttcataggaaaagtccttgtgtacgataaagctcaaggcatcgaccgggtcgccgtggatcaagatatccattttaaccaagtcactgaccttgtagccgtcttcttcatagtccagggaagcataacccttggtcatggacttgagcctgtcaaagaagtcaaaaactatctcagacaagggaatagaataaatcacattgacccggatatcgtccaggtattccatggtgataaagtctccccttttgcgctggcagatctccatgacaggtcctacatagtcatttggcacagtaatagtggctttcacgtagggctcttcaatggattcaacttcgccagcatcgggcatctcagatgggttagaaacttccacttgctggccgtctgttttattgacatggtagataactga

SEQ ID NO: 4396 - protein, 161 aa, Alloiococcus otitidis
MNGDFKLLAGNFGFQLVCYSPTPFIGKVLVYDKAQGIDRVAVDQDIHFNQVTDLVAVFFIVQGSITLGHGLEPVKEVKNYLRQGNRINHIDPDIVQVFHGDKVSPFALADLHDRSYIVIWHSNSGFHVGLFNGFNFASIGHLRWVRNFHLLAVCFIDMVDN

SEQ ID NO: 4397 - DNA, 1173 bp, Alloiococcus otitidis
  CDS (16)..(1170)
tattggaggaaaactatgccagaaaaagaagacttgtatgacattctaggtgtctccaaagatgcatcccaggcagacatcaaaaaggcctaccggaaactctctaaaaaatatcaccccgacattaatgatgaacctggtgcggaagaaaaattcaaacaggtctctgaagcctatgaaaccctaagcgatgaagacaagcgggctgcctatgaccgttatggccatgctgctaatgatccgaacttcagtggtggctcagcaggcggtggcttttctggaagctctagcttcggcggctttgaagatatcttcgaccagttcttcggtggtggcggaaacagaagacgggacccttctgccccccgacctggtgatgacctgcagtatgtcatggacttggactttgaagaagccatttttggcaaggagaccactattaaatataaccgccaggaagaatgtgacaactgtggcgggaccggtgccaagccagggaccagtccccaaacctgctcacggtgtggggggtctggtagtattcaagcagaacggaacactccttttggccggatgatgacccagcaaacctgtcccaactgtaacggaacaggtcaagaaatcaaggaaaaatgctcagtgtgccacggcaaaggatcgactaaaaaacgtcacagtgtcaaggtgacagttcctgctggtgtggaagacggccaccaaatgcggttgcagaaccaaggttctgctggtaaaaaccgtggtccttatggtgacttgtttatcgtcttccgggtcaaaccgtccgatatctttgaccggcgcggttctgaaatctactacaaccaagaaatcaatattgtccaggccagcttaggagatgaaatccaagttccaactgtccacggtaaggtcaagttcaaaatcccagccggtacccaacctaacaccaccttccggatcaaaggcaagggggcacccaagcttcacggcaacagcaacggtgaccagcacatcacagtcaaggttgtcgtgccgaaaaaattaaatgaacgccagtccgaattgctgaaagaatttgcccaagaaggcgatattggccaggtcaaagagcaagacaagcaggaaggttctttcttctcaaagtttaaagatgcttttaaagataaagattaa

SEQ ID NO: 4398 - protein, 385 aa, Alloiococcus otitidis
MPEKEDLYDILGVSKDASQADIKKAYRKLSKKYHPDINDEPGAEEKFKQVSEAYETLSDEDKRAAYDRYGHAANDPNFSGGSAGGGFSGSSSFGGFEDIFDQFFGGGGNRRRDPSAPRPGDDLQYVMDLDFEEAIFGKETTIKYNRQEECDNCGGTGAKPGTSPQTCSRCGGSGSIQAERNTPFGRMMTQQTCPNCNGTGQEIKEKCSVCHGKGSTKKRHSVKVTVPAGVEDGHQMRLQNQGSAGKNRGPYGDLFIVFRVKPSDIFDRRGSEIYYNQEINIVQASLGDEIQVPTVHGKVKFKIPAGTQPNTTFRIKGKGAPKLHGNSNGDQHITVKVVVPKKLNERQSELLKEFAQEGDIGQVKEQDKQEGSFFSKFKDAFKDKD

SEQ ID NO: 4399 - DNA, 390 bp, Alloiococcus otitidis
  CDS (4)..(387)
gcgatgaagacaagcgggctgcctatgaccgttatggccatgctgctaatgatccgaacttcagtggtggctcagcaggcggtggcttttctggaagctctagcttcggcggctttgaagatatcttcgaccagttcttcggtggtggcggaaacagaagacgggacccttctgccccccgacctggtgatgacctgcagtatgtcatggacttggactttgaagaagccatttttggcaaggagaccactattaaatataaccgccaggaagaatgtgacaactgtggcgggaccggtgccaagccagggaccagtccccaaacctgctcacggtgtggggggtctggtagtattcaagcagaacggaacactccttttggccggatga

SEQ ID NO: 4400 - protein, 128 aa, Alloiococcus otitidis
MKTSGLPMTVMAMLLMIRTSVVAQQAVAFLEALASAALKISSTSSSVVAETEDGTLLPPDLVMTCSMSWTWTLKKPFLARRPLLNITARKNVTTVAGPVPSQGPVPKPAHGVGGLVVFKQNGTLLLAG

SEQ ID NO: 4401 - DNA, 1869 bp, Alloiococcus otitidis
  CDS (31)..(1866)
attaaaatttgtacgaaggagattgataatatggctaaaattattggtatcgacttagggacaactaactctgctgttgctgttttagaaggtggcgaacccaccattatcccaaacaaagaagggaaccgaaccaccccttctgtagtttcctttaaagatggggaaattcaagtgggagaagttgccaaacgtcaggcgattaccaactcaaacactgtcatgtcggttaaacgttacatgggtgaagatcgcaagatagaagctgaagggaaggaatacacccctcaagaaatttctgcttatatcttgcaacacttaaaatcttacgctgaagactaccttggtgaaaaagtcactaatgcggttattactgttccagcttacttcaacgactcccaaagacaggctaccaaagatgctggtaaaattgccggcttggaagtggaccgtattgtcaacgaaccgactgctgcttccttggcttacggcctcgaaaaacaagactcagaagaaaacatcttggtctttgacttgggtgggggaacctttgacgtttccatccttgagttaggtgatggcgtttttgacgtcctctcgactgctggggacaaccagttaggtggggacgattttgataacaaaatcatcgactacctggtcgaaaacttcaaaaaagaaaacggcattgacttgtcaactgacaagatggctcgtcaacgcttgaaagatgcggcggaaaaagccaaaaaagacttatccagcaccagccaaactcaaattagcctacctttcattacagcaggggataacggcccactccacttggaacaatccctaacacgggctaagtttgatgaattgaccttggacttggtcaaccggactaaagaaccagtccgtaaagcattgtcagatgcaggtatcgacaaaaatgaaattgaccaagttgtcctagtaggtgggtctacccgtatcccagctgttgtcgatgtggtcaaaactgaaactggtaaagaaccgaaccggtcagtcaaccctgatgaagtggttgccttaggtgctgccatccaaggtggggttatctctggtgatgtgaaagatgttgtccttcttgacgttaccccactttcacttgggattgaaaccatgggcggtgtcttcacaaccttaattgaacggaacaccaccatcccaaccagcaagtcccaagtcttctccactgcagccgacaaccagccagctgttgacatccacgtcttgcaaggtgagcgaccaatggccaaagataacaaaactcttggccgtttccaattgactgatatccctgcagccccacgtggtgtccctcaaattgaagtctcctttgacattgacaaaaacggtattgtcaaagtttccgctaaggaccaaggaactggtaaagaacaaaacattaccataaaatcttcttctggtctttccgatgaagatatcgaccgtatggtgaaagatgcggaagaaaatgccgaagccgacaaaaaacgtcgggaagaagtggacctccgtaatgaagccgaccaacttgtcttccaagttgacaaaacattagatgaccttgaaggcaaagtcgacgagtctgaagcccaaaaggcgaaagacgctaaagaagaactgaaatcagcccttgaaggcgatgaccttgatgctattaaagaaaaacgcgatgcattaagtgaaattgtccaagacctaactgttaagctttatgagcaagcccaacaacagcaacaagcttccggccaagatgaccaagctgggtctgatgattccggctcagacgacgatgacgtggtcgatgctgattttgaagaagttgacgacgactaa

SEQ ID NO: 4402 - protein, 612 aa, Alloiococcus otitidis
MAKIIGIDLGTTNSAVAVLEGGEPTIIPNKEGNRTTPSVVSFKDGEIQVGEVAKRQAITNSNTVMSVKRYMGEDRKIEAEGKEYTPQEISAYILQHLKSYAEDYLGEKVTNAVITVPAYFNDSQRQATKDAGKIAGLEVDRIVNEPTAASLAYGLEKQDSEENILVFDLGGGTFDVSILELGDGVFDVLSTAGDNQLGGDDFDNKIIDYLVENFKKENGIDLSTDKMARQRLKDAAEKAKKDLSSTSQTQISLPFITAGDNGPLHLEQSLTRAKFDELTLDLVNRTKEPVRKALSDAGIDKNEIDQVVLVGGSTRIPAVVDVVKTETGKEPNRSVNPDEVVALGAAIQGGVISGDVKDVVLLDVTPLSLGIETMGGVFTTLIERNTTIPTSKSQVFSTAADNQPAVDIHVLQGERPMAKDNKTLGRFQLTDIPAAPRGVPQIEVSFDIDKNGIVKVSAKDQGTGKEQNITIKSSSGLSDEDIDRMVKDAEENAEADKKRREEVDLRNEADQLVFQVDKTLDDLEGKVDESEAQKAKDAKEELKSALEGDDLDAIKEKRDALSEIVQDLTVKLYEQAQQQQQASGQDDQAGSDDSGSDDDDVVDADFEEVDDD

SEQ ID NO: 4403 - DNA, 396 bp, Alloiococcus otitidis
  CDS (139)..(393)
agcttaacagttaggtcttggacaatttcacttaatgcatcgcgtttttctttaatagcatcaaggtcatcgccttcaagggctgatttcagttcttctttagcgtctttcgccttttgggcttcagactcgtcgactttgccttcaaggtcatctaatgttttgtcaacttggaagacaagttggtcggcttcattacggaggtccacttcttcccgacgttttttgtcggcttcggcattttcttccgcatctttcaccatacggtcgatatcttcatcggaaagaccagaagaagattttatggtaatgttttgttctttaccagttccttggtccttagcggaaactttgacaataccgtttttgtcaatgtcaaaggagacttcaatttga

SEQ ID NO: 4404 - protein, 85 aa, Alloiococcus otitidis
MPSRSSNVLSTWKTSWSASLRRSTSSRRFLSASAFSSASFTIRSISSSERPEEDFMVMFCSLPVPWSLAETLTIPFLSMSKETSI

SEQ ID NO: 4405 - DNA, 573 bp, Alloiococcus otitidis
  CDS (97)..(570)
gggacaccacgtggggctgcagggatatcagtcaattggaaacggccaagagttttgttatctttggccattggtcgctcaccttgcaagacgtggatgtcaacagctggctggttgtcggctgcagtggagaagacttgggacttgctggttgggatggtggtgttccgttcaattaaggttgtgaagacaccgcccatggtttcaatcccaagtgaaagtggggtaacgtcaagaaggacaacatctttcacatcaccagagataaccccaccttggatggcagcacctaaggcaaccacttcatcagggttgactgaccggttcggttctttaccagtttcagttttgaccacatcgacaacagctgggatacgggtagacccacctactaggacaacttggtcaatttcatttttgtcgatacctgcatctgacaatgctttacggactggttctttagtccggttgaccaagtccaaggtcaattcatcaaacttagcccgtgttagggattgttccaagtggagtgggccgttatcccctgctgtaatgaaaggtaggctaatttga

SEQ ID NO: 4406 - protein, 158 aa, Alloiococcus otitidis
MSTAGWLSAAVEKTWDLLVGMVVFRSIKVVKTPPMVSIPSESGVTSRRTTSFTSPEITPPWMAAPKATTSSGLTDRFGSLPVSVLTTSTTAGIRVDPPTRTTWSISFLSIPASDNALRTGSLVRLTKSKVNSSNLARVRDCSKWSGPLSPAVMKGRLI

SEQ ID NO: 4407 - DNA, 573 bp, Alloiococcus otitidis; identical to SEQ ID NO: 4405
  CDS (55)..(570)

SEQ ID NO: 4408 - protein, 172 aa, Alloiococcus otitidis
MLSLAIGRSPCKTWMSTAGWLSAAVEKTWDLLVGMVVFRSIKVVKTPPMVSIPSESGVTSRRTTSFTSPEITPPWMAAPKATTSSGLTDRFGSLPVSVLTTSTTAGIRVDPPTRTTWSISFLSIPASDNALRTGSLVRLTKSKVNSSNLARVRDCSKWSGPLSPAVMKGRLI

SEQ ID NO: 4409 - DNA, 609 bp, Alloiococcus otitidis
  CDS (37)..(606)
aaaagaggggttttcttgagtcatgaagaagaaaatgtgaaccaagaagaatctgttgcctccagtgaggacaaaacagaagaccaaaatcaagacgaaggactagaccaagactcagacctagctagttccgaccaaggtcaagatgagggcctagacagccgtatagaagaattagaggctgaaaaggaagatttggaagaaaaagttcttcgtctccaggccgaaatccaaaacttgcaaagacggcatgccaaaaaccgggaagagctccaacgctttcgagctcaagatttggccaaggatgttttgccatccatcgataacttagaaagggccttgcaaattgaagttcaagatgaatcgggccaaaacctgaaaaaaggtttagaaatggtcaaggacagtctcttgcaggccttggctaacaaccagattgaagtgatcgatccaaccggagaggactttgaccccaacttccatgaagcctatgcccaagtgcctggccaagagggtcaagaaagtaatcaagtagctgaagtctttgaaaaaggctacaagcttcatgaccgggtcttgagacctgctaaagttaccgttgttgaataa

SEQ ID NO: 4410 - protein, 190 aa, Alloiococcus otitidis
MNQEESVASSEDKTEDQNQDEGLDQDSDLASSDQGQDEGLDSRIEELEAEKEDLEEKVLRLQAEIQNLQRRHAKNREELQRFRAQDLAKDVLPSIDNLERALQIEVQDESGQNLKKGLEMVKDSLLQALANNQIEVIDPTGEDFDPNFHEAYAQVPGQEGQESNQVAEVFEKGYKLHDRVLRPAKVTVVE

SEQ ID NO: 4411 - DNA, 609 bp, Alloiococcus otitidis; identical to SEQ ID NO: 4409
  CDS (16)..(606)

SEQ ID NO: 4412 - protein, 197 aa, Alloiococcus otitidis
MSHEEENVNQEESVASSEDKTEDQNQDEGLDQDSDLASSDQGQDEGLDSRIEELEAEKEDLEEKVLRLQAEIQNLQRRHAKNREELQRFRAQDLAKDVLPSIDNLERALQIEVQDESGQNLKKGLEMVKDSLLQALANNQIEVIDPTGEDFDPNFHEAYAQVPGQEGQESNQVAEVFEKGYKLHDRVLRPAKVTVVE

SEQ ID NO: 4413 - DNA, 1071 bp, Alloiococcus otitidis
  CDS (31)..(1068)
gggaacttggtggactgttttgctgaaaggatgagtaacatgctaacagcaagacaaatttcaattttagaaaatattatccatttttttgccaatacgggtgaggcagttggctcccaaaccattgcccagcaaaccgatattgaagccagtccggcgaccatccgcaatgagatgaagttgttagaggagaaaggttttattcaaaaaaaccacctgtcttcgggccgggtgccttccatgcagggctaccgtttttacctagaccatattatgcaaccggaacagccacctcaggactccattgcccggattgcccaggagttgtccaagcagtttcaggaattggatgacattgtcaaccagtcagcccagattttgtcagacttgaccaactatacagccattgtcttaggccctaaagccctagaatcccggctgacagatctcaaactggttaaggtcaatgctaaccaggtcatggcaattgtggaaacagacgggcaaaccattaagagtagcgttttccgggtggggggccgagtcagtcgtagcctcattgaccggctgtctgacttactcaagcaagagctacaaggccttctccttagccaggttcatgacaagctagaccgggagattccctttcttgttcgtcgctcactaggggatatatccagcctactcagcccggttattaacagtattgaacaagccgaccaaaaccaagtccacatatctggtaagaacaagttgttcaactttaccgaggatttagggattgaccaaatcaagggcttgtttgacttgtttgaagaccatgaacatgacttaagccgcttggtcaacttagctgaccagggggttaacatccggattggtgaggaattaaatgatgagcgttttaataacctgagcctgatcactgttgattattcagttggtaatattgggtcaggcctgattgccatccttggcccaaccaatatgccttattccaagacacttggcgtgattgaaggttttaaaattgagctcgttgaagcgctcttgaattattatatccattag

SEQ ID NO: 4414 - protein, 346 aa, Alloiococcus otitidis
MSNMLTARQISILENIIHFFANTGEAVGSQTIAQQTDIEASPATIRNEMKLLEEKGFIQKNHLSSGRVPSMQGYRFYLDHIMQPEQPPQDSIARIAQELSKQFQELDDIVNQSAQILSDLTNYTAIVLGPKALESRLTDLKLVKVNANQVMAIVETDGQTIKSSVFRVGGRVSRSLIDRLSDLLKQELQGLLLSQVHDKLDREIPFLVRRSLGDISSLLSPVINSIEQADQNQVHISGKNKLFNFTEDLGIDQIKGLFDLFEDHEHDLSRLVNLADQGVNIRIGEELNDERFNNLSLITVDYSVGNIGSGLIAILGPTNMPYSKTLGVIEGFKIELVEALLNYYIH

SEQ ID NO: 4415 - DNA, 1071 bp, Alloiococcus otitidis; identical to SEQ ID NO: 4413
  CDS (10)..(1068)

SEQ ID NO: 4416 - protein, 353 aa, Alloiococcus otitidis
MDCFAERMSNMLTARQISILENIIHFFANTGEAVGSQTIAQQTDIEASPATIRNEMKLLEEKGFIQKNHLSSGRVPSMQGYRFYLDHIMQPEQPPQDSIARIAQELSKQFQELDDIVNQSAQILSDLTNYTAIVLGPKALESRLTDLKLVKVNANQVMAIVETDGQTIKSSVFRVGGRVSRSLIDRLSDLLKQELQGLLLSQVHDKLDREIPFLVRRSLGDISSLLSPVINSIEQADQNQVHISGKNKLFNFTEDLGIDQIKGLFDLFEDHEHDLSRLVNLADQGVNIRIGEELNDERFNNLSLITVDYSVGNIGSGLIAILGPTNMPYSKTLGVIEGFKIELVEALLNYYIH

SEQ ID NO: 4417 - DNA, 1071 bp, Alloiococcus otitidis; identical to SEQ ID NO: 4413
  CDS (7)..(1068)

SEQ ID NO: 4418 - protein, 354 aa, Alloiococcus otitidis
MVDCFAERMSNMLTARQISILENIIHFFANTGEAVGSQTIAQQTDIEASPATIRNEMKLLEEKGFIQKNHLSSGRVPSMQGYRFYLDHIMQPEQPPQDSIARIAQELSKQFQELDDIVNQSAQILSDLTNYTAIVLGPKALESRLTDLKLVKVNANQVMAIVETDGQTIKSSVFRVGGRVSRSLIDRLSDLLKQELQGLLLSQVHDKLDREIPFLVRRSLGDISSLLSPVINSIEQADQNQVHISGKNKLFNFTEDLGIDQIKGLFDLFEDHEHDLSRLVNLADQGVNIRIGEELNDERFNNLSLITVDYSVGNIGSGLIAILGPTNMPYSKTLGVIEGFKIELVEALLNYYIH

SEQ ID NO: 4419 - DNA, 981 bp, Alloiococcus otitidis
  CDS (196)..(978)
gaaagtattaaggacagaaatgtaggtgtcgaattgcaagttaagaaaatacatcacccttaccagccagctgaccttcacagggatgagatcgttttgatattaggcttttttgacggtgttcatagaggacatgccaaagtgatcaaagaaggggtccaactagcccaagaccagggcttaacgagcgtggtcatgactttcaaccgtcatccctccttggtttaccaaaaatatgatcccagccggcatgcctacttaactacccgtgaacgtaagttagacttgatcgagcgacttggggtggacattttatatgaaatggatttcacctctagtttgggagccttgacaccggaagaatttgtccaagactatatggtagactggcatgctaaatatgtggtagccggttttgactatacttatggcaagaaagacattgccaatatggaaagactgcctaaactggcacaaggccgttttgaggtcaagactgtccagatgtattccgatgaccaaggcaaaatttcctcgacccggattcggcaattgattgcaaacggccaggtcaaagcagccaaccagcttctgggttactattatgaaacaagcggctatgtcatccatggcgaagccaggggacgggacttgggttatccaacagccaatattgaaccccatccccaagtctttctgcccggagtcggtatctataccgtggctatccaagtcaatggccagtggtacggcggcatggcttctattggctacaatgtaacctttggctttcgcaacaaccagtctattgaggtaaatatttttgattttgaccaaatgatctacggggaaaatgttagaattaagtggttggactaccttcgttcagaagaaaaattcgactctagccaggacttgattgaccagctgggtaaagaccaaaaggactcggaaaagagactagcagacctagcaccctga

SEQ ID NO: 4420 - protein, 261 aa, Alloiococcus otitidis
MTFNRHPSLVYQKYDPSRHAYLTTRERKLDLIERLGVDILYEMDFTSSLGALTPEEFVQDYMVDWHAKYVVAGFDYTYGKKDIANMERLPKLAQGRFEVKTVQMYSDDQGKISSTRIRQLIANGQVKAANQLLGYYYETSGYVIHGEARGRDLGYPTANIEPHPQVFLPGVGIYTVAIQVNGQWYGGMASIGYNVTFGFRNNQSIEVNIFDFDQMIYGENVRIKWLDYLRSEEKFDSSQDLIDQLGKDQKDSEKRLADLAP

SEQ ID NO: 4421 - DNA, 981 bp, Alloiococcus otitidis; identical to SEQ ID NO: 4419
  CDS (142)..(978)

SEQ ID NO: 4422 - protein, 279 aa, Alloiococcus otitidis
MIKEGVQLAQDQGLTSVVMTFNRHPSLVYQKYDPSRHAYLTTRERKLDLIERLGVDILYEMDFTSSLGALTPEEFVQDYMVDWHAKYVVAGFDYTYGKKDIANMERLPKLAQGRFEVKTVQMYSDDQGKISSTRIRQLIANGQVKAANQLLGYYYETSGYVIHGEARGRDLGYPTANIEPHPQVFLPGVGIYTVAIQVNGQWYGGMASIGYNVTFGFRNNQSIEVNIFDFDQMIYGENVRIKWLDYLRSEEKFDSSQDLIDQLGKDQKDSEKRLADLAP

SEQ ID NO: 4423 - DNA, 981 bp, Alloiococcus otitidis; identical to SEQ ID NO: 4419
  CDS (34)..(978)

SEQ ID NO: 4424 - protein, 315 aa, Alloiococcus otitidis
MQVKKIHHPYQPADLHRDEIVLILGFFDGVHRGHAKVIKEGVQLAQDQGLTSVVMTFNRHPSLVYQKYDPSRHAYLTTRERKLDLIERLGVDILYEMDFTSSLGALTPEEFVQDYMVDWHAKYVVAGFDYTYGKKDIANMERLPKLAQGRFEVKTVQMYSDDQGKISSTRIRQLIANGQVKAANQLLGYYYETSGYVIHGEARGRDLGYPTANIEPHPQVFLPGVGIYTVAIQVNGQWYGGMASIGYNVTFGFRNNQSIEVNIFDFDQMIYGENVRIKWLDYLRSEEKFDSSQDLIDQLGKDQKDSEKRLADLAP

SEQ ID NO: 4425 - DNA, 573 bp, Alloiococcus otitidis
  CDS (49)..(570)
acgaaggtagtccaaccacttaattctaacattttccccgtagatcatttggtcaaaatcaaaaatatttacctcaatagactggttgttgcgaaagccaaaggttacattgtagccaatagaagccatgccgccgtaccactggccattgacttggatagccacggtatagataccgactccgggcagaaagacttggggatggggttcaatattggctgttggataacccaagtcccgtcccctggcttcgccatggatgacatagccgcttgtttcataatagtaacccagaagctggttggctgctttgacctggccgtttgcaatcaattgccgaatccgggtcgaggaaattttgccttggtcatcggaatacatctggacagtcttgacctcaaaacggccttgtgccagtttaggcagtctttccatattggcaatgtctttcttgccataagtatagtcaaaaccggctaccacatatttagcatgccagtctaccatatagtcttggacaaattcttccggtgtcaaggctcccaaactagaggtgaaatccatttcatataa

SEQ ID NO: 4426 - protein, 174 aa, Alloiococcus otitidis
MVKIKNIYLNRLVVAKAKGYIVANRSHAAVPLAIDLDSHGIDTDSGQKDLGMGFNIGCWITQVPSPGFAMDDIAACFIIVTQKLVGCFDLAVCNQLPNPGRGNFALVIGIHLDSLDLKTALCQFRQSFHIGNVFLAISIVKTGYHIFSMPVYHIVLDKFFRCQGSQTRGEIHFI

SEQ ID NO: 4427 - DNA, 999 bp, Alloiococcus otitidis
  CDS (121)..(996)
gtctttgggttgggccaggtcaaatacctggccttatgcccttacatagtcatttattcagcaagaaaaaaggaagtgagattcgtggatggcctcttagccttgtggaaagaaagaggaatgactagccatgattgtgtctataaagtgaggaagatactggccactaagaaggttggccactctggtactctagacccagatgtcgatggcgttctcccccttggaattggcaaggggaccaagatgttagaatatatggtagagtcttctaagacctaccaggggcaagtggaacttggtcagtcaaccacaacccaggacgggagtggagacatcctatcccaggctccagtcacagcttccgacttaaataaagaacaagttgaccgtgttctcaatcgctttataggggaggtcagtcaggtcccacccatgtattccgctgttcgggtcaagggacgtcgtttatacgactatgcccgtaagaatgaagccgtagaccggccggagaggaaggtagttattcaggctttagaccggacttctgacttagcctttgacccaatgaagcagactgctagcttttcctttagggtggtttgcagtaaggggacctatgtcaggaccttggctgaagatattgcccgagagttgggatatcctggttatatgagtgacttgacccggctagggagcgggggttttaccaaagaggactgcttgaccctcaaccagctagaagacctggtaaaccaggggcaagttgctgactgcttagagcccatcgaaagagcccttagtcacttgccctcccagcagctgtcaagtgaagaatggtcccgggtaaaacatggggctttattgagccgagctgactatgcccagacctatccactggttttgtattaccaaaaccaggcggtagctatttaccaggctcatccagaaaaaccagatcttttgaaacctaagaaagtattaaggacagaaatgtag

SEQ ID NO: 4428 - protein, 292 aa, Alloiococcus otitidis
MTSHDCVYKVRKILATKKVGHSGTLDPDVDGVLPLGIGKGTKMLEYMVESSKTYQGQVELGQSTTTQDGSGDILSQAPVTASDLNKEQVDRVLNRFIGEVSQVPPMYSAVRVKGRRLYDYARKNEAVDRPERKVVIQALDRTSDLAFDPMKQTASFSFRVVCSKGTYVRTLAEDIARELGYPGYMSDLTRLGSGGFTKEDCLTLNQLEDLVNQGQVADCLEPIERALSHLPSQQLSSEEWSRVKHGALLSRADYAQTYPLVLYYQNQAVAIYQAHPEKPDLLKPKKVLRTEM

SEQ ID NO: 4429 - DNA, 999 bp, Alloiococcus otitidis; identical to SEQ ID NO: 4427
  CDS (76)..(996)

SEQ ID NO: 4430 - protein, 307 aa, Alloiococcus otitidis
MRFVDGLLALWKERGMTSHDCVYKVRKILATKKVGHSGTLDPDVDGVLPLGIGKGTKMLEYMVESSKTYQGQVELGQSTTTQDGSGDILSQAPVTASDLNKEQVDRVLNRFIGEVSQVPPMYSAVRVKGRRLYDYARKNEAVDRPERKVVIQALDRTSDLAFDPMKQTASFSFRVVCSKGTYVRTLAEDIARELGYPGYMSDLTRLGSGGFTKEDCLTLNQLEDLVNQGQVADCLEPIERALSHLPSQQLSSEEWSRVKHGALLSRADYAQTYPLVLYYQNQAVAIYQAHPEKPDLLKPKKVLRTEM

SEQ ID NO: 4431 - DNA, 999 bp, Alloiococcus otitidis; identical to SEQ ID NO: 4427
  CDS (10)..(996)

SEQ ID NO: 4432 - protein, 329 aa, Alloiococcus otitidis
MGQVKYLALCPYIVIYSARKKEVRFVDGLLALWKERGMTSHDCVYKVRKILATKKVGHSGTLDPDVDGVLPLGIGKGTKMLEYMVESSKTYQGQVELGQSTTTQDGSGDILSQAPVTASDLNKEQVDRVLNRFIGEVSQVPPMYSAVRVKGRRLYDYARKNEAVDRPERKVVIQALDRTSDLAFDPMKQTASFSFRVVCSKGTYVRTLAEDIARELGYPGYMSDLTRLGSGGFTKEDCLTLNQLEDLVNQGQVADCLEPIERALSHLPSQQLSSEEWSRVKHGALLSRADYAQTYPLVLYYQNQAVAIYQAHPEKPDLLKPKKVLRTEM

SEQ ID NO: 4433 - DNA, 387 bp, Alloiococcus otitidis
  CDS (31)..(384)
attaccaagatagacaaggagtgtgaccctatgccgagccacagacaaggacgtgtcgcccaagagatcaagcgtgaagcaacggatattttgcgaaatgaggtccgagatcctcgtgtcgatggggtgaccatcacggatgctgaagtgacggctgatcttcaacacgctaaaatattctactccaccttgtccgatgatgaccaagttaagactgaaacccaagaaggacttgacaaggcaagtggattggtccgaagtgaaattggcaaccggattaagttgtttaagacacctgaaatccgttttgtccgggacgaatccttagaatacggcaaccggattgaccaaattatcaatgaattacaccaggaagattcaaactaa

SEQ ID NO: 4434 - protein, 118 aa, Alloiococcus otitidis
MPSHRQGRVAQEIKREATDILRNEVRDPRVDGVTITDAEVTADLQHAKIFYSTLSDDDQVKTETQEGLDKASGLVRSEIGNRIKLFKTPEIRFVRDESLEYGNRIDQIINELHQEDSN

SEQ ID NO: 4435 - DNA, 2373 bp, Alloiococcus otitidis
  CDS (13)..(2370)
aaaggtgattgtatgagcaaaatgcgtgtttacgaatttgccaaagaactcgacctccctagcaaagaggtattagagttagctaatgaagccggcttgacctttaaaagtcatatggcctctattagcgaccaagataaacaaacgatcaagaatgccttagccgatagacaaaatcagagtcataagcaaaacaagcctgacaataattcgaaacaaaacaagaccgaaaataaccctaagcaaggcaagtcaggccaaaatcaatctaagcaaggcaagggcaaaagcaaaaatgcttccaaaaacaagccaactaagggaaacaaacaaggcaaagcaaataacaaaaaagcaaaaaataaacctactcctaagaaacaaggcaagcaagataaacagggaaaaggcaaggaaaacaccaaaatgaacccgcgtaaaagaacgacagacgaaaccgaaaaaggcgaacaaggcaagaaccgtaagcaaaaacggagttctagacagcaccgcgggatccatggcggaccagctggcaaccgtaaaaaacaaaaacgaaacaagcaaaaacagggcaaccagcaagcaaacccaacccctcgcaaaaacaaacctctaccagagtcagttgaatattctgaagggatgactgtttttgaactggctaaaaaactccaccgggaaccagccgaaattgttaaaaaactctttatgatgggggttgtggccaaccaaaaccaatccctagatggggatgctattgaactgatcctagctgattatggagtggaagccgaagaaaaagtagaagtggatattgctgacttcgataactacttcgaccaggaaccggtagaagaaaacctccaaacccggcctgcggcagtcaccataatgggccacgtcgaccatgggaaaaccaccctcttggacaccttacgggaggctaatgtcgcagaaggggaggctggaggaattacccaacacattggtgcctaccaggtagaagtagacggtaaattaatcaccttcctggacaccccaggccacgctgcctttaccaccatgcgggcccggggggcagatattactgatgtcgctattatagtggtggcagctgatgatggggttatgcctcaaactgaagaggccattaaccacgctaaagcagcgggtgtcccaattatcatagccgttaacaaggttgataaaccagatgccaaccctcaaaaagttatgcaggaattagctgcctatgaattgatcccagaagactggggcggggacactatctttgttgagatttccgctaagtttaaccaaaatcttgatgaactcttggaaatgatcctactagttgctgaagtggaagaactgaaggcagatccaagccggaacgctatcggtagtgtgatcgaagccagactggacaaggctcaaggacctgtcgcaaccttattggtccaagaaggaaccctccaccacggggactccattgtggtcggcaatacccatggccggatccggaccatgaccaatgacaaaggacgacgagttaagaaggccttaccgtccactccagttgaaattaccggcttaaacgacacccctcaagctggtgaccgttttgtcgtctttgaagacgaaaaaacagcccgtcaagttggtgaacgccgggccaatgcagccactgaagctagtcgtaaggccagccaaaaaatcaccctggacaacttgtttgatagcttagaagagggcgagttaaaagaagttaatgtcattgtcaaagccgatgtccaagggtcagttgaggccttggtttcctccttagagaaaattgatgtggaaggagtcaagattaacatcatccacacaggggtaggagccatcaatgaaagtgatattactcttgcttctgctgggaatgccattattatcggcttcaacgttagaccgaccccacaggcccaagaaagtgccgaccgggaagaagttgaaatcagaacccaccgtgtgatctacaatgccattgaagaaattgaacaagccatgaaagggatgcttgaccctgagtttgaagaaaaagtcactgggacagctactgttcgtgaaacctttaatgtctccaaggttgggaccattgccggctgtttcgtttcaaatggcgtgattaaacgatccagctcagtccgtttaatccgagatggggtagtcatccatgaaggagaactatctagtttgaaacgcttccaagacgatgctaaagaagtttccaatggctttgaatgtggccttaccatcgaaggctataatgatattaaagttgatgatgttattgaagcttatgaaatggttgaattaccaagatag

SEQ ID NO: 4436 - protein, 786 aa, Alloiococcus otitidis
MSKMRVYEFAKELDLPSKEVLELANEAGLTFKSHMASISDQDKQTIKNALADRQNQSHKQNKPDNNSKQNKTENNPKQGKSGQNQSKQGKGKSKNASKNKPTKGNKQGKANNKKAKNKPTPKKQGKQDKQGKGKENTKMNPRKRTTDETEKGEQGKNRKQKRSSRQHRGIHGGPAGNRKKQKRNKQKQGNQQANPTPRKNKPLPESVEYSEGMTVFELAKKLHREPAEIVKKLFMMGVVANQNQSLDGDAIELILADYGVEAEEKVEVDIADFDNYFDQEPVEENLQTRPAAVTIMGHVDHGKTTLLDTLREANVAEGEAGGITQHIGAYQVEVDGKLITFLDTPGHAAFTTMRARGADITDVAIIVVAADDGVMPQTEEAINHAKAAGVPIIIAVNKVDKPDANPQKVMQELAAYELIPEDWGGDTIFVEISAKFNQNLDELLEMILLVAEVEELKADPSRNAIGSVIEARLDKAQGPVATLLVQEGTLHHGDSIVVGNTHGRIRTMTNDKGRRVKKALPSTPVEITGLNDTPQAGDRFVVFEDEKTARQVGERRANAATEASRKASQKITLDNLFDSLEEGELKEVNVIVKADVQGSVEALVSSLEKIDVEGVKINIIHTGVGAINESDITLASAGNAIIIGFNVRPTPQAQESADREEVEIRTHRVIYNAIEEIEQAMKGMLDPEFEEKVTGTATVRETFNVSKVGTIAGCFVSNGVIKRSSSVRLIRDGVVIHEGELSSLKRFQDDAKEVSNGFECGLTIEGYNDIKVDDVIEAYEMVELPR

SEQ ID NO: 4437 - DNA, 360 bp, Alloiococcus otitidis
  CDS (88)..(357)
atcacacggtgggttctgatttcaacttcttcccggtcggcactttcttgggcctgtggggtcggtctaacgttgaagccgataataatggcattcccagcagaagcaagagtaatatcactttcattgatggctcctacccctgtgtggatgatgttaatcttgactccttccacatcaattttctctaaggaggaaaccaaggcctcaactgacccttggacatcggctttgacaatgacattaacttcttttaactcgccctcttctaagctatcaaacaagttgtccagggtgattttttggctggccttacgactagcttcagtggctgcattggcccggcgttcaccaacttga

SEQ ID NO: 4438 - protein, 90 aa, Alloiococcus otitidis
MAFPAEARVISLSLMAPTPVWMMLILTPSTSIFSKEETKASTDPWTSALTMTLTSFNSPSSKLSNKLSRVIFWLALRLASVAALARRSPT

SEQ ID NO: 4439 - DNA, 360 bp, Alloiococcus otitidis; identical to SEQ ID NO: 4437
  CDS (73)..(357)

SEQ ID NO: 4440 - protein, 95 aa, Alloiococcus otitidis
MKPIIMAFPAEARVISLSLMAPTPVWMMLILTPSTSIFSKEETKASTDPWTSALTMTLTSFNSPSSKLSNKLSRVIFWLALRLASVAALARRSPT

SEQ ID NO: 4441 - DNA, 366 bp, Alloiococcus otitidis
  CDS (31)..(363)
aggtttgtttttgcgaggggttgggtttgcttgctggttgccctgtttttgcttgtttcgtttttgttttttacggttgccagctggtccgccatggatcccgcggtgctgtctagaactccgtttttgcttacggttcttgccttgttcgcctttttcggtttcgtctgtcgttcttttacgcgggttcattttggtgttttccttgccttttccctgtttatcttgcttgccttgtttcttaggagtaggtttattttttgcttttttgttatttgctttgccttgtttgtttcccttagttggcttgtttttggaagcatttttgcttttgcccttgccttgcttagattgattttggcctga

SEQ ID NO: 4442 - protein, 111 aa, Alloiococcus otitidis
MLVALFLLVSFLFFTVASWSAMDPAVLSRTPFLLTVLALFAFFGFVCRSFTRVHFGVFLAFSLFILLALFLRSRFIFCFFVICFALFVSLSWLVFGSIFAFALALLRLILA

SEQ ID NO: 4443 - DNA, 303 bp, Alloiococcus otitidis
  CDS (1)..(300)
atgaacaataaagataaagctttaaatcttttgggcttagctcaaagagcaggaaagttggtgaccggtcaaggacctgttttagaatccatccggtccaagcggggccactatgtcattctggccaaggatgcttcgccaaggtccattaaacaatttaccgacaagtgtcacagttatgaaatagccttgaatttagactatacaaatgaagaaatttcccgagcaattggcaaaaaccgcaaatcttgttcactcacggatagggggtttgccaagtcttttgccagtttacacagatga

SEQ ID NO: 4444 - protein, 100 aa, Alloiococcus otitidis
MNNKDKALNLLGLAQRAGKLVTGQGPVLESIRSKRGHYVILAKDASPRSIKQFTDKCHSYEIALNLDYTNEEISRAIGKNRKSCSLTDRGFAKSFASLHR

SEQ ID NO: 4445 - DNA, 309 bp, Alloiococcus otitidis
  CDS (34)..(306)
ggagctggtagcttgaaaaagaaaaaaatcccgatgcggaaatgcgttattttaaatgaaatgaaacccaaaaaagacatggttcggattgttcgtgacaaggaaggtcaagtttccattgacccgaccggcaagaaaaatggtcgaggggcttatgtttcagttgacccttccattatcgaagaaggccggaaaaaagatgtcctagcccgggccttaaatacggaaattccagatgatttttaccaggaactcaaagagtacgttgaatacactaaggcaagggcagagttattaaatgaacaataa

SEQ ID NO: 4446 - protein, 91 aa, Alloiococcus otitidis
MRKCVILNEMKPKKDMVRIVRDKEGQVSIDPTGKKNGRGAYVSVDPSIIEEGRKKDVLARALNTEIPDDFYQELKEYVEYTKARAELLNEQ

SEQ ID NO: 4447 - DNA, 309 bp, Alloiococcus otitidis; identical to SEQ ID NO: 4445
  CDS (13)..(306)

SEQ ID NO: 4448 - protein, 98 aa, Alloiococcus otitidis
MKKKKIPMRKCVILNEMKPKKDMVRIVRDKEGQVSIDPTGKKNGRGAYVSVDPSIIEEGRKKDVLARALNTEIPDDFYQELKEYVEYTKARAELLNEQ

SEQ ID NO: 4449 - DNA, 1401 bp, Alloiococcus otitidis
  CDS (31)..(1398)
caattgaattttagactgaaggagagaactatgagtaaagaattggctggcgctttggaagttttagagaaggaaaaaggaatttcaaaagatattgtcattgaagccttggaagacgccctggttgcagcatataaaagaaattacggcacctctcaaaatgtggaggtcaatttcaatgatgcttctggggatattactgtctaccaggtcaaggaagtggtggaagaagcagaagataccaatagtcagattgccttggtggatgctagagaaatcaaccgggcttatgaagtgggagacaagatcaaatttgaggtcacacccaagtctttcggtcggatagcagcccaaacagccaagcaagttgtcctgcaaagaatgcgggaagcggagcggtccattatctacaatgagtatattgagtaccaagatgacctcatgacggggacggttgaaagacaagacaaccgttttatctatgttgacttgggtaaggtggaagctgttttgtccaagcgtgaccaaattgaagacgaaacttacaattcccacgaccggatcaaggtctatgttagcaaggtggaggattctaccaagggcccccaagtcttcgtcagtcggacccaccccaacctaatcaaacgcctttttgaacaagaagttcctgagatttacgatggaaccgttgagattgtctctattgccagagaagcaggggaccggtccaagctggctgtaacttcccacgacagcgaagttgatgctgttgggacttgtgtcggtgccaagggagcccgggttcaagttgtcgttgatgaattaaatggggagaacatggacatagtggaatgggacaaggatccccgtatctttatcgaaaatgccttaaacccagcccaagtcttggctgtccaatttagttcagatgaccattcttgccgggttgtcgttcccgactaccaactttccttggccattgggaagaaaggccaaaatgttcgtctagctgccaaattgacaggctacaaaattgatattttacctgaaagccaggttaatttggaagatggctcctttgaagacggtggaacttaccaggttgaagaagaagtagagccaagtgaagctgagccatccgttgaagagactggcctagaaagaggacaagaagctgagccaggagctgaaccagtagcggatagccttaaccaagaaagtcaagaattaggagaccaagcagaaaatccgacaaatctagaaggtttggacgagttagaagatggtcaagccagtgtaggagaggaagaagatttggactcgagctcggcccagctaagccaagatgatgaatctacccttgacgtaaacgaagcaagtgacctagacctagatgaatag

SEQ ID NO: 4450 - protein, 456 aa, Alloiococcus otitidis
MSKELAGALEVLEKEKGISKDIVIEALEDALVAAYKRNYGTSQNVEVNFNDASGDITVYQVKEVVEEAEDTNSQIALVDAREINRAYEVGDKIKFEVTPKSFGRIAAQTAKQVVLQRMREAERSIIYNEYIEYQDDLMTGTVERQDNRFIYVDLGKVEAVLSKRDQIEDETYNSHDRIKVYVSKVEDSTKGPQVFVSRTHPNLIKRLFEQEVPEIYDGTVEIVSIAREAGDRSKLAVTSHDSEVDAVGTCVGAKGARVQVVVDELNGENMDIVEWDKDPRIFIENALNPAQVLAVQFSSDDHSCRVVVPDYQLSLAIGKKGQNVRLAAKLTGYKIDILPESQVNLEDGSFEDGGTYQVEEEVEPSEAEPSVEETGLERGQEAEPGAEPVADSLNQESQELGDQAENPTNLEGLDELEDGQASVGEEEDLDSSSAQLSQDDESTLDVNEASDLDLDE

SEQ ID NO: 4451 - DNA, 1401 bp, Alloiococcus otitidis; identical to SEQ ID NO: 4449
  CDS (4)..(1398)

SEQ ID NO: 4452 - protein, 465 aa, Alloiococcus otitidis
MNFRLKERTMSKELAGALEVLEKEKGISKDIVIEALEDALVAAYKRNYGTSQNVEVNFNDASGDITVYQVKEVVEEAEDTNSQIALVDAREINRAYEVGDKIKFEVTPKSFGRIAAQTAKQVVLQRMREAERSIIYNEYIEYQDDLMTGTVERQDNRFIYVDLGKVEAVLSKRDQIEDETYNSHDRIKVYVSKVEDSTKGPQVFVSRTHPNLIKRLFEQEVPEIYDGTVEIVSIAREAGDRSKLAVTSHDSEVDAVGTCVGAKGARVQVVVDELNGENMDIVEWDKDPRIFIENALNPAQVLAVQFSSDDHSCRVVVPDYQLSLAIGKKGQNVRLAAKLTGYKIDILPESQVNLEDGSFEDGGTYQVEEEVEPSEAEPSVEETGLERGQEAEPGAEPVADSLNQESQELGDQAENPTNLEGLDELEDGQASVGEEEDLDSSSAQLSQDDESTLDVNEASDLDLDE

SEQ ID NO: 4453 - DNA, 552 bp, Alloiococcus otitidis
  CDS (28)..(549)
gttggggtgggtccgactgacgaagacttgggggcccttggtagaatcctccaccttgctaacatagaccttgatccggtcgtgggaattgtaagtttcgtcttcaatttggtcacgcttggacaaaacagcttccaccttacccaagtcaacatagataaaacggttgtcttgtctttcaaccgtccccgtcatgaggtcatcttggtactcaatatactcattgtagataatggaccgctccgcttcccgcattctttgcaggacaacttgcttggctgtttgggctgctatccgaccgaaagacttgggtgtgacctcaaatttgatcttgtctcccacttcataagcccggttgatttctctagcatccaccaaggcaatctgactattggtatcttctgcttcttccaccacttccttgacctggtagacagtaatatccccagaagcatcattgaaattgacctccacattttgagaggtgccgtaatttcttttatatgctgcaaccagggcgtcttccaaggcttcaatgacaatatcttttga

SEQ ID NO: 4454 - protein, 174 aa, Alloiococcus otitidis
MGALGRILHLANIDLDPVVGIVSFVFNLVTLGQNSFHLTQVNIDKTVVLSFNRPRHEVILVLNILIVDNGPLRFPHSLQDNLLGCLGCYPTERLGCDLKFDLVSHFISPVDFSSIHQGNLTIGIFCFFHHFLDLVDSNIPRSIIEIDLHILRGAVISFICCNQGVFQGFNDNIF

SEQ ID NO: 4455 - DNA, 552 bp, Alloiococcus otitidis; identical to SEQ ID NO: 4453
  CDS (7)..(549)

SEQ ID NO: 4456 - protein, 181 aa, Alloiococcus otitidis
MGPTDEDLGALGRILHLANIDLDPVVGIVSFVFNLVTLGQNSFHLTQVNIDKTVVLSFNRPRHEVILVLNILIVDNGPLRFPHSLQDNLLGCLGCYPTERLGCDLKFDLVSHFISPVDFSSIHQGNLTIGIFCFFHHFLDLVDSNIPRSIIEIDLHILRGAVISFICCNQGVFQGFNDNIF

SEQ ID NO: 4457 - DNA, 528 bp, Alloiococcus otitidis
  CDS (49)..(525)
gcgagtcattcgctcactctttttgatgacaaatttttgattaaagaggtgaaggctttgaagatccaagataaagttttggacttggcgaaacccttagctgaggacctaggttatcagattgttgacgttgaatacttaaaagaaggtcagaattggttcttgcgggtctatattgaccaagctggtggggtaagtttggatgactgcacccaattcagtgaacaattaagtggactcctggaccagcaagagactaactttatccctcaagcatactatttagaggtgtcttctcctggtgctgagcgccctctgaagacggcagaagacctcaagcaagcagttgggtcttatattcatgttaaattgtatgaaatgattgggcccgataatgcatttgaaggtcacttaaaagaagtcgaccaagacaccattacccttactgttaaggtcaaaacccgtaaaaaagatgttgtgattaaccgagataatatctcaaaagctagactagcaattgaattttag

SEQ ID NO: 4458 - protein, 159 aa, Alloiococcus otitidis
MKALKIQDKVLDLAKPLAEDLGYQIVDVEYLKEGQNWFLRVYIDQAGGVSLDDCTQFSEQLSGLLDQQETNFIPQAYYLEVSSPGAERPLKTAEDLKQAVGSYIHVKLYEMIGPDNAFEGHLKEVDQDTITLTVKVKTRKKDVVINRDNISKARLAIEF

SEQ ID NO: 4459 - DNA, 528 bp, Alloiococcus otitidis; identical to SEQ ID NO: 4457
  CDS (37)..(525)

SEQ ID NO: 4460 - protein, 163 aa, Alloiococcus otitidis
MIKEVKALKIQDKVLDLAKPLAEDLGYQIVDVEYLKEGQNWFLRVYIDQAGGVSLDDCTQFSEQLSGLLDQQETNFIPQAYYLEVSSPGAERPLKTAEDLKQAVGSYIHVKLYEMIGPDNAFEGHLKEVDQDTITLTVKVKTRKKDVVINRDNISKARLAIEF

SEQ ID NO: 4461 - DNA, 4392 bp, Alloiococcus otitidis
  CDS (58)..(4389)
aagggttcaggactttcgtatctggccctttttggctcattagaaagcagggcaaagatgtcactcaatcaaaaagaaatgtatcaagtattgatgcagcaagtccacttagaagaacacctacaagaccgaccccttcttaaagccggcagtttgaagcaaattgttgtttacaaggctcaacaagcctgggacctgaccctccaatttcctcagatcctcccttttaaggacttccaagttttggagtctgccctcttgcagcatatcccagaagtcaaccagatccatttaagggttgatgcccaagatgacagttttgaccaggacctcctccaggactattggcctaaggcggtgaagtttagcggagtcgattctcccctttgcaatgacttactagacaagaccctcccttatctagatgggaagcaagtttactttgacctggaccatgaagtgacccgggacaagtttgaccatgacttcctacctcggatccaagctggctaccagcaagtgggctttcccaaccactttaaaatcaaggctagggtcgatgcccagaaaaattcagatcaaattgccgccttccgtaaagaaaaagaagaaaaagaccaggccttgtctcaagagctaaccaaccaatttatcaaggccagccaaaagaaagaagaagggggatccaaagccaagtcggaggccttgaagatgggccgggccatccctgaccacgaaacgattacccagatggttgatgtggaagaagaagagagccgtctgacctttgaaggatacgtttttgatgtggaaatcaaatccctccggtcagatagaaagctccttctctttaaaatgaccgactatagctcttccttcctattcaaaaaattctctaataattcttctgacgaagccctatttgaccaagtccaagagggaatgtggctcaaggttagaggcagtgttcaagaagatacctttgtcaaagacctagttgtcatggcccaagacatccaagaggtcaaaaaagaaccccggcgggacctggctaaggaaggggagaagagggtggaacttcatgcccataccaccatgagtcagatggacggtttggtgccggccaaggatttggtcaagcaagcagccgcttttgaccaaccggctattgccatcactgatcatgctgtagtccaatccttcccagaggcccattatgctggcttagacactggtgttaaaattctttacggtgtggaagccaatttggttagtgatggcgaattggtagcatacaatccggccgatataaagctggaagaggcaacttatgtggtcttcgacgtggaaacaaccggactatcggctcgttatgaccaaatcattgaattggccgctgtgaagatggaaaatggggaaatcgtttctgaattccaagaatttattgacccaggccagcccttgtctgagactacgaccaatttgaccgggatcaccgatgacatggtccaaggatccaaaagtgaagacgaagtcctccatgcctttcaagccttttcagaaggcactgtcttggtcgcccataacgcttcctttgacatgggctttatcaatacggcctaccaacgacatggcctaggacaagctgaccagcctgtgattgataccttggaattgtcccgcatgctccacccaaacttgaaaagccaccggttaaacactctggctaagcggtatgacgtggccttagaacaccaccaccgggccatctatgactcggagtcaacggctaaactcttgtggatcttcttaaaagaagccaaagaccaatatgacatgactagccaccaagacttgaatagccaggtgggggaaggcgaggcttacaagcaggcccggccaacccatgccagtattttggtcaagaatcaaaaaggcttgaaaaacctctttaaaattgtctcccacgcccatgtcaactacttctaccgggttccccgtatacctaagtctatcttgagcaagtaccgggaaggccttttggttgggtctggttgcggacagggagagctctttgaggctattatgcaaaagggctatgacgaagccttggcagttgcccaggactatgattatattgaagttatgcccaagtcagcctatattgacctcttggaccgggacttaatcaaggatgaggcaacccttgaagaaatgattgaaaacctggttaaaataggccatgaacttgatatacccgtggtagctacagggaatgtccactacctaaacccagaagatgccgttttacgggatatcctcctggaaactgccaaaaagggagccttctccaaagcccggaacccagaagtccactttagaacaacagatgaaatgttagaagagttttccttcctaggccaggaccaggcttatgagattgtggtcaccaacacccaaaaaattgctgattctatcgaatcaatctctcctgtcaaggaaggcctctatgccccgaaaatggaagggtcggaccaagagatacgtcagatgagttacaagcaagccaaggctctctatggcgaccccttgccaagtattgtagaggaaaggctcgaaaaagagttgaagagtattattgacaacaatttctctgtcatttacttaatttcccagaaattggtcaaaaaaagtgttgaagatggctatttggttggttccagggggtcggttgggtcaagctttgtggccaccatgaccgggatcacagaagtcaacccactaccgccccactaccgctgtcctaactgccagcacaccgaattcttcacaaatggggaagtggggtccggctttgacttagaggccaaaaaatgtccggaatgtcaaagcctaatggaatcagacggccacgacattcccttcgaaaccttccttggttttaatggggacaaggtgccagatatcgatttgaacttctcaggtgaataccaggccaaggcccacaactataccaaggttttgtttggagaagaccatgtctaccgggcagggaccatcacgacgattgctgacaagacggcctttggttttgtcaagggttatgaaagggacaagcagataaactaccggtcggctgaagtggaccggctgtcagatggtttaaccggagtgagacggtcaaccggccagcacccaggagggattatcgtcataccggatgacatggatgtgtttgatttcacccccatccagtacccggctgacgaccagacggctgagtggcaaactacccactttgacttccactccatcgacgaaaacgtcttgaagctggatatcctgggacatgatgacccgaccatgatccgaaaactccaggacttgtccggctttgaccctcaagaaataccggtaagtgatgaagatgttatgaaaattttctcaggcccggaagttctaggggtgaccccagagcaaattttctccaataccggaactctcggagtacctgaatttggtacccaatttgtccgagaaatgttagagcaaacccacccctctacctttgctgaactcttgcagatctcaggcctctcccacgggacagatgtttggctgggcaatgctgaagaattaattcgcaaccacaacattcccttgtccgaggtgatcggctgccgggatgatatcatggtctaccttcaacaccaaggtcttgaagacagcctggcctttaagattatggaatttgttcgtaagggtcggggcttgcaagatgactggattgctaccatgaaagaaaatgatgttcctgattggtatattgaatcctgcaaaaaaatcaagtacatgttccctaaagcccacgcagctgcctatgtcttgatggcccttagggtagcttactttaaagtccactaccccctttactactacgctgcctacttttccatccgggctagtgattttgacttaattgctatggtcaagggcaaggaaggcattaaaggggctatgaaggaaatcagggacaaggaaagagaaaaaactgccacagctaaggacaaagccttgctcaccgtccttgaagtagccaatgaaatggttgaacggggttttgacttcaagatggtggacatcaacaagtcccaagccaaagactttgtcatcgaagacaatggccttcgtgctccatttagggcagtcccttccttggggtccagtgccgcccaggctgtcattgatgccagggaggacagcgacttcttgtccaaggaagacctatcaaaacggggcaagttgtcgaaaacggtcatggactacctggacaataaccacgttttagaccacctgccggacgaaaaccaactttccctctttgacttttaa

SEQ ID NO: 4462 - protein, 1444 aa, Alloiococcus otitidis
MSLNQKEMYQVLMQQVHLEEHLQDRPLLKAGSLKQIVVYKAQQAWDLTLQFPQILPFKDFQVLESALLQHIPEVNQIHLRVDAQDDSFDQDLLQDYWPKAVKFSGVDSPLCNDLLDKTLPYLDGKQVYFDLDHEVTRDKFDHDFLPRIQAGYQQVGFPNHFKIKARVDAQKNSDQIAAFRKEKEEKDQALSQELTNQFIKASQKKEEGGSKAKSEALKMGRAIPDHETITQMVDVEEEESRLTFEGYVFDVEIKSLRSDRKLLLFKMTDYSSSFLFKKFSNNSSDEALFDQVQEGMWLKVRGSVQEDTFVKDLVVMAQDIQEVKKEPRRDLAKEGEKRVELHAHTTMSQMDGLVPAKDLVKQAAAFDQPAIAITDHAVVQSFPEAHYAGLDTGVKILYGVEANLVSDGELVAYNPADIKLEEATYVVFDVETTGLSARYDQIIELAAVKMENGEIVSEFQEFIDPGQPLSETTTNLTGITDDMVQGSKSEDEVLHAFQAFSEGTVLVAHNASFDMGFINTAYQRHGLGQADQPVIDTLELSRMLHPNLKSHRLNTLAKRYDVALEHHHRAIYDSESTAKLLWIFLKEAKDQYDMTSHQDLNSQVGEGEAYKQARPTHASILVKNQKGLKNLFKIVSHAHVNYFYRVPRIPKSILSKYREGLLVGSGCGQGELFEAIMQKGYDEALAVAQDYDYIEVMPKSAYIDLLDRDLIKDEATLEEMIENLVKIGHELDIPVVATGNVHYLNPEDAVLRDILLETAKKGAFSKARNPEVHFRTTDEMLEEFSFLGQDQAYEIVVTNTQKIADSIESISPVKEGLYAPKMEGSDQEIRQMSYKQAKALYGDPLPSIVEERLEKELKSIIDNNFSVIYLISQKLVKKSVEDGYLVGSRGSVGSSFVATMTGITEVNPLPPHYRCPNCQHTEFFTNGEVGSGFDLEAKKCPECQSLMESDGHDIPFETFLGFNGDKVPDIDLNFSGEYQAKAHNYTKVLFGEDHVYRAGTITTIADKTAFGFVKGYERDKQINYRSAEVDRLSDGLTGVRRSTGQHPGGIIVIPDDMDVFDFTPIQYPADDQTAEWQTTHFDFHSIDENVLKLDILGHDDPTMIRKLQDLSGFDPQEIPVSDEDVMKIFSGPEVLGVTPEQIFSNTGTLGVPEFGTQFVREMLEQTHPSTFAELLQISGLSHGTDVWLGNAEELIRNHNIPLSEVIGCRDDIMVYLQHQGLEDSLAFKIMEFVRKGRGLQDDWIATMKENDVPDWYIESCKKIKYMFPKAHAAAYVLMALRVAYFKVHYPLYYYAAYFSIRASDFDLIAMVKGKEGIKGAMKEIRDKEREKTATAKDKALLTVLEVANEMVERGFDFKMVDINKSQAKDFVIEDNGLRAPFRAVPSLGSSAAQAVIDAREDSDFLSKEDLSKRGKLSKTVMDYLDNNHVLDHLPDENQLSLFDF

SEQ ID NO: 4463 - DNA, 1731 bp, Alloiococcus otitidis
  CDS (100)..(1728)
atactgaaggagtgtttggcaataatgaagcaatcgaaattattctcaccgactctaagggaagtgcctagtgatgccgaggtgaagagccaccagttgatgctaagggcgggctacatccgccaagtggcagcaggtgtttacgcttatttgcccttggcacgccgggtcttagacaaggttgaggctatcattcgggaagagatggacaaggtcgggtcagtggagatgaccctacctggcctcatcccggctgatttatggaaagaaactggccggtatatttcttatggagaggatttaattaagctgagggaccgtcacgaccgggactttatcttaggcccaacccatgaagagacctttaccgacttgattcgcaacaccatcgattcttacaagaaattgcccctctccctttaccaaattcaaaccaagtttcgtgacgaaaaacggcctcggtcagggcttttaagaggacgggaatttatcatgaaagatgcctacaccttccatgaagactatgctagtttggatgagtcttatgaagccatgaagcaggcctaccacaatatttttacccgggttggcttaaactaccgggctgtcattggggatgcagctgctatggggggacgagactccatggaatttatggccctatctgatgccggtgaagacattgtcgttcactccgaccagagtgactatgcagccaacttggaaatggcagaaagctactaccaagctgagccaagtcaagcccatgccttagacctggaattagtggagacacccggtgtgaccactatggaagaccttgcttccttcttgaagctgagcctcaaagataccttgaagagtgtcctgtttatagtggacgaaaaaattccggtcctagccatcacccggggggaccatacagccaatgaggtgaaggtcagaatggccttggatgggaaaaaaattgacccggctagtgaggatcaaatcagagaacttttccaaacagtcccaggctacgcaggtccaattggcttgtctgaccaagtaacagtggtcttggaccatcacgtgaaagacatggctaatacggtcactggggccaaccaggaaggcaaacactataaaaatgtcaaccccgaccgggactttgacgactgtacttatgctgacatccggatggtagaagaaggcgatccttctccagaccaaaaaggtcaacttgtcttccaaaaagggattgaattgggccacatctttaaactgggcaccttttacagtgaagccatgcaggcaaccgtcttggactccaacggccgaccaactccggtcattatgggaagttacgggattggggttagccgactcttgtcagctgttgttgaacaaaattcggatgacaagggtattgtctggccagaacaattagctcctttccaggtccacttggtgcccattaaatggaccaacgatattcaaggtcagctgacaaaagacatcgaggcggccttgactgcccagggctatgaggtcttaattgatgaccggaatgaaagaccgggggttaaatttaccgatgccgaattaatcggcattccttatcaaatcaccattggcaaaaaagccaaggatggtatagtggaagttagctcaagacggaccggtcaaatgaaagaagctaagttagaccaagtattggacgctattcaatcttttaaagaagactaa

SEQ ID NO: 4464 - protein, 543 aa, Alloiococcus otitidis
MLRAGYIRQVAAGVYAYLPLARRVLDKVEAIIREEMDKVGSVEMTLPGLIPADLWKETGRYISYGEDLIKLRDRHDRDFILGPTHEETFTDLIRNTIDSYKKLPLSLYQIQTKFRDEKRPRSGLLRGREFIMKDAYTFHEDYASLDESYEAMKQAYHNIFTRVGLNYRAVIGDAAAMGGRDSMEFMALSDAGEDIVVHSDQSDYAANLEMAESYYQAEPSQAHALDLELVETPGVTTMEDLASFLKLSLKDTLKSVLFIVDEKIPVLAITRGDHTANEVKVRMALDGKKIDPASEDQIRELFQTVPGYAGPIGLSDQVTVVLDHHVKDMANTVTGANQEGKHYKNVNPDRDFDDCTYADIRMVEEGDPSPDQKGQLVFQKGIELGHIFKLGTFYSEAMQATVLDSNGRPTPVIMGSYGIGVSRLLSAVVEQNSDDKGIVWPEQLAPFQVHLVPIKWTNDIQGQLTKDIEAALTAQGYEVLIDDRNERPGVKFTDAELIGIPYQITIGKKAKDGIVEVSSRRTGQMKEAKLDQVLDAIQSFKED

SEQ ID NO: 4465 - DNA, 1731 bp, Alloiococcus otitidis; identical to SEQ ID NO: 4463
  CDS (25)..(1728)

SEQ ID NO: 4466 - protein, 568 aa, Alloiococcus otitidis
MKQSKLFSPTLREVPSDAEVKSHQLMLRAGYIRQVAAGVYAYLPLARRVLDKVEAIIREEMDKVGSVEMTLPGLIPADLWKETGRYISYGEDLIKLRDRHDRDFILGPTHEETFTDLIRNTIDSYKKLPLSLYQIQTKFRDEKRPRSGLLRGREFIMKDAYTFHEDYASLDESYEAMKQAYHNIFTRVGLNYRAVIGDAAAMGGRDSMEFMALSDAGEDIVVHSDQSDYAANLEMAESYYQAEPSQAHALDLELVETPGVTTMEDLASFLKLSLKDTLKSVLFIVDEKIPVLAITRGDHTANEVKVRMALDGKKIDPASEDQIRELFQTVPGYAGPIGLSDQVTVVLDHHVKDMANTVTGANQEGKHYKNVNPDRDFDDCTYADIRMVEEGDPSPDQKGQLVFQKGIELGHIFKLGTFYSEAMQATVLDSNGRPTPVIMGSYGIGVSRLLSAVVEQNSDDKGIVWPEQLAPFQVHLVPIKWTNDIQGQLTKDIEAALTAQGYEVLIDDRNERPGVKFTDAELIGIPYQITIGKKAKDGIVEVSSRRTGQMKEAKLDQVLDAIQSFKED

SEQ ID NO: 4467 - DNA, 1731 bp, Alloiococcus otitidis; identical to SEQ ID NO: 4463
  CDS (16)..(1728)

SEQ ID NO: 4468 - protein, 571 aa, Alloiococcus otitidis
MAIMKQSKLFSPTLREVPSDAEVKSHQLMLRAGYIRQVAAGVYAYLPLARRVLDKVEAIIREEMDKVGSVEMTLPGLIPADLWKETGRYISYGEDLIKLRDRHDRDFILGPTHEETFTDLIRNTIDSYKKLPLSLYQIQTKFRDEKRPRSGLLRGREFIMKDAYTFHEDYASLDESYEAMKQAYHNIFTRVGLNYRAVIGDAAAMGGRDSMEFMALSDAGEDIVVHSDQSDYAANLEMAESYYQAEPSQAHALDLELVETPGVTTMEDLASFLKLSLKDTLKSVLFIVDEKIPVLAITRGDHTANEVKVRMALDGKKIDPASEDQIRELFQTVPGYAGPIGLSDQVTVVLDHHVKDMANTVTGANQEGKHYKNVNPDRDFDDCTYADIRMVEEGDPSPDQKGQLVFQKGIELGHIFKLGTFYSEAMQATVLDSNGRPTPVIMGSYGIGVSRLLSAVVEQNSDDKGIVWPEQLAPFQVHLVPIKWTNDIQGQLTKDIEAALTAQGYEVLIDDRNERPGVKFTDAELIGIPYQITIGKKAKDGIVEVSSRRTGQMKEAKLDQVLDAIQSFKED

SEQ ID NO: 4469 - DNA, 1335 bp, Alloiococcus otitidis
  CDS (562)..(1332)
cagcttaatctttgcgacaaccctagccctcatcttgggcattgtttagctgaaaggaatttttatatgatcgaaagtatactaatatttattgttgtctttgggcttttggtctttttccacgaattaggccacttttacttcgctaaacggtcagggatcttagtcagggaattttccattggctttggccctaaaatttttagtgttaaaaaaggggagacggcctatgtcatccgcctcttgcccctgggtggttatgtcatgatggctggttatgaagaggaagaagacttaagaccgggcatgcaggcctacttgaccctggacgaaaacgaccgggtgaccttgattaatttaaacgatgacctagaccaggtggataaattagtgattcagatgactgactttgacctggagcaagacctctacctcaagggccatgtcttcggggaagaagaggagacaagatttaaagtagcccggactgctagtatcaagcgggagaatggggtggaagtccaaattgcccccctagacaggcaatttaaccatgcccctttgatggcccggattttaaccaactttgcaggtcccttaaacaactttatcctggctattgttgcttttattcttttaggttttatccagggtggggtcttaagtaatgatcctgttgttggggacgttcaagctgattctcctgctagccaggcggggctacaagcagacgaccgagttctatccgttgatggccagccggtggaatcctggttggacttgacggcagctattacttctaatgtggaagaagagaccgaattggaggtccaacgggagaaccagaccttgcaagttagcctgacaccggagtatgctagtcttgaagatgggagtcaatatgcccggattgggattttgcgggacatggagacctccatttcctccatcttggcttttggctttaccgaaacctggaccattatcctaatgatttttgaagccttgggacagatgttcaccggtagtgccggcctagaccaactcggtgggccagttgccatttttgcggttaccgggtcagccttccagactgggggcttcttggccgttttaaacctttttgcaaccttgagtgccaaccttggtttagtgaacttaatccctatcccaggcctggacggtgggaagttgctgcttaacttccttgaagccatccggggtaaacagttaagccaggaaaaagaaattgtcctcaccctggttggggcaggtttcttggttgtcttgatgttggtcgttacttggaatgatattacgcaatttttcttttaa

SEQ ID NO: 4470 - protein, 257 aa, Alloiococcus otitidis
MMARILTNFAGPLNNFILAIVAFILLGFIQGGVLSNDPVVGDVQADSPASQAGLQADDRVLSVDGQPVESWLDLTAAITSNVEEETELEVQRENQTLQVSLTPEYASLEDGSQYARIGILRDMETSISSILAFGFTETWTIILMIFEALGQMFTGSAGLDQLGGPVAIFAVTGSAFQTGGFLAVLNLFATLSANLGLVNLIPIPGLDGGKLLLNFLEAIRGKQLSQEKEIVLTLVGAGFLVVLMLVVTWNDITQFFF

SEQ ID NO: 4471 - DNA, 1335 bp, Alloiococcus otitidis; identical to SEQ ID NO: 4469
  CDS (67)..(1332)

SEQ ID NO: 4472 - protein, 422 aa, Alloiococcus otitidis
MIESILIFIVVFGLLVFFHELGHFYFAKRSGILVREFSIGFGPKIFSVKKGETAYVIRLLPLGGYVMMAGYEEEEDLRPGMQAYLTLDENDRVTLINLNDDLDQVDKLVIQMTDFDLEQDLYLKGHVFGEEEETRFKVARTASIKRENGVEVQIAPLDRQFNHAPLMARILTNFAGPLNNFILAIVAFILLGFIQGGVLSNDPVVGDVQADSPASQAGLQADDRVLSVDGQPVESWLDLTAAITSNVEEETELEVQRENQTLQVSLTPEYASLEDGSQYARIGILRDMETSISSILAFGFTETWTIILMIFEALGQMFTGSAGLDQLGGPVAIFAVTGSAFQTGGFLAVLNLFATLSANLGLVNLIPIPGLDGGKLLLNFLEAIRGKQLSQEKEIVLTLVGAGFLVVLMLVVTWNDITQFFF

SEQ ID NO: 4473 - DNA, 858 bp, Alloiococcus otitidis
  CDS (619)..(855)
gatactagaggaataccaaggtcgcaacaggcggtttggaggcctctaaccaggttcaaaaggatgatgaaattgtttcaaagaatcgaaacagccattatactggttgtaatcttaattcccatatttgtctacgggtcctggccccttcaactggccatcctatttttggcctgccgtggtttgtttgaaatcttgcggatgattgacatccccttctttagcctgccttctcttttagcccacttatcgatcgcttttattgttttttcggaccggctaggccccaaacttccgacctaccttgaggtccaccatatgatcgccttgatgaccctattaatgttgatatcggcgacagtccaccagtcctttacctttatcgatgccggcattgctgttttagggattatttatattggttacggcttttattctatgtattatattcgggagcaagacggcttccttttaatcttgattgtcctagcaacggtcatctcggacactggcgcttacctgattgggagtttctttggcaaacacaagctagctcccgtcctctcgcccaataaaacaattgaagggtccttaggaggcgttttggcatctggcttcttgatctttattatcgtatccttatttcccttcctacccatgacaccagtggtcggtggcttcattgctattattattgccattgctagccaatttggtgacttgattgaatcggggatgaagcgggaatttaatgtcaaagatacgggaacgatcctgccaggccacggtggtattttagaccggtttgacagcttaatctttgcgacaaccctagccctcatcttgggcattgtttag

SEQ ID NO: 4474 - protein, 79 aa, Alloiococcus otitidis
MIFIIVSLFPFLPMTPVVGGFIAIIIAIASQFGDLIESGMKREFNVKDTGTILPGHGGILDRFDSLIFATTLALILGIV

SEQ ID NO: 4475 - DNA, 858 bp, Alloiococcus otitidis; identical to SEQ ID NO: 4473
  CDS (64)..(855)

SEQ ID NO: 4476 - protein, 264 aa, Alloiococcus otitidis
MMKLFQRIETAIILVVILIPIFVYGSWPLQLAILFLACRGLFEILRMIDIPFFSLPSLLAHLSIAFIVFSDRLGPKLPTYLEVHHMIALMTLLMLISATVHQSFTFIDAGIAVLGIIYIGYGFYSMYYIREQDGFLLILIVLATVISDTGAYLIGSFFGKHKLAPVLSPNKTIEGSLGGVLASGFLIFIIVSLFPFLPMTPVVGGFIAIIIAIASQFGDLIESGMKREFNVKDTGTILPGHGGILDRFDSLIFATTLALILGIV

SEQ ID NO: 4477 - DNA, 765 bp, Alloiococcus otitidis
  CDS (28)..(762)
tgttttttattggaggaaaaccaagttatgaaaactgataaggaagcgaaagccctacaagtcattcccaaccatgtagcggttatcatggacggcaatgggaggtgggccaagcaaagaggtttggtccggactgaaggccaccgggaaggcttggaggcagtcaaaagggtaaccaaggctgccaacaagtggggagtcaaggtgttaaccttgtatgctttttccacggagaactggaagcgacctccccaggaaattaaatacttaatgaacttgcctatcgctttttttgacaagtttatgccagaattgatggaaaataacatcaaagtcatgacctctgggacggaagaaggcgttcctggtcggaccatcaaaacggttcaaaaggtaatcgaccaaaccaaggacaatgatggcatggtcttgaacctggcttttaactacggtagccgggaagagattacccgggcggtccgattgattggccaggacattttagaccacaagttagagcccaagcaagttgatgacaagctgattgctagctacttgtatacaaatcctttaggccagtatgcggatgtcgacctcatgatccggactagtggggaagagcggttaagtaactttctcctttggcaaaatgcctatagtgaattttacttttctccgctttattggcctgactttaatgaagaagcatttgatgagatactagaggaataccaaggtcgcaacaggcggtttggaggcctctaa

SEQ ID NO: 4478 - protein, 245 aa, Alloiococcus otitidis
MKTDKEAKALQVIPNHVAVIMDGNGRWAKQRGLVRTEGHREGLEAVKRVTKAANKWGVKVLTLYAFSTENWKRPPQEIKYLMNLPIAFFDKFMPELMENNIKVMTSGTEEGVPGRTIKTVQKVIDQTKDNDGMVLNLAFNYGSREEITRAVRLIGQDILDHKLEPKQVDDKLIASYLYTNPLGQYADVDLMIRTSGEERLSNFLLWQNAYSEFYFSPLYWPDFNEEAFDEILEEYQGRNRRFGGL

SEQ ID NO: 4479 - DNA, 765 bp, Alloiococcus otitidis; identical to SEQ ID NO: 4477
  CDS (10)..(762)

SEQ ID NO: 4480 - protein, 251 aa, Alloiococcus otitidis
MEENQVMKTDKEAKALQVIPNHVAVIMDGNGRWAKQRGLVRTEGHREGLEAVKRVTKAANKWGVKVLTLYAFSTENWKRPPQEIKYLMNLPIAFFDKFMPELMENNIKVMTSGTEEGVPGRTIKTVQKVIDQTKDNDGMVLNLAFNYGSREEITRAVRLIGQDILDHKLEPKQVDDKLIASYLYTNPLGQYADVDLMIRTSGEERLSNFLLWQNAYSEFYFSPLYWPDFNEEAFDEILEEYQGRNRRFGGL

SEQ ID NO: 4481 - DNA, 951 bp, Alloiococcus otitidis
  CDS (19)..(948)
acaataggaggaattataatgaaaaaagcaaatctattagcaagtttagccgcgtcaaccctacttttagctgcttgtggtaatggtggcgaagaagacgctaaccaagaagctgaaaacgaagaagttaccaaccaagaagaaaacgacaacggtgaagaagctgctgaacaagaagctgctgacagtggtgaagacgacgatgaagaaggcgaaccagtcactctgacagttggtgcttccaacaccccccacggtgaaatcttggaatttgtccaaccccaattagaagaagagggcattgagcttgaaatcgtcacctatgacgattatgtcctcccgaacgaagccttggacggaggggacttggatgccaactattaccaacacattccattcctagaaaactctattgaagaaaatggctacgacttagttagtgcaggaggcgtccacgttgagccaattggggcttactcccatgactatgacagcttagctgacttgccagatggggcagacatcctagtctccaacaacttggcagactacggccgtatcctcaaaatgtttgaagaccaaggtttaattgaagttgacgacaatgtggacatcaccgaagcaacctttgatgatattgtggacaacccacatgactttaacttcgactatgaatacgacccaggcttgatgcctaccctatatgaaaacaatgaaggtgacgttgttttcatcaacgctaactttgccgttgactcagggattgacatcttagaggaagccattgaattggaaagcactgactccccttatgttaacgtcatcgccattcgtgcagaagacgaaggggacgaaaatatcgaaaaattactcgatgccctccactcccaagaaaccaaagactttatcaatgacacttgggagggagccgttatcccagccgatgaataa

SEQ ID NO: 4482 - protein, 310 aa, Alloiococcus otitidis
MKKANLLASLAASTLLLAACGNGGEEDANQEAENEEVTNQEENDNGEEAAEQEAADSGEDDDEEGEPVTLTVGASNTPHGEILEFVQPQLEEEGIELEIVTYDDYVLPNEALDGGDLDANYYQHIPFLENSIEENGYDLVSAGGVHVEPIGAYSHDYDSLADLPDGADILVSNNLADYGRILKMFEDQGLIEVDDNVDITEATFDDIVDNPHDFNFDYEYDPGLMPTLYENNEGDVVFINANFAVDSGIDILEEAIELESTDSPYVNVIAIRAEDEGDENIEKLLDALHSQETKDFINDTWEGAVIPADE

SEQ ID NO: 4483 - DNA, 708 bp, Alloiococcus otitidis
  CDS (466)..(705)
tctaccgtgcctaatctttttttagcaagtgtggacctgtcagaatttgttgcttttgaaaatgtcaactggccaaatgtccagcaagcaacggtagagaccatctacatgaccctcttgtccatgatcgcagtctttgtctttggactcttattgggcctgctcctctttgagactcaaaacaaagaaggtaaattcttccaggttttctactacatcgttgccgttatcgttaatatttttagggctattccctttattatcttaattgtcttacttattcccttcactcggtcgcttttagggaccatgacgggacccaatgcagccttaccagccttgatactctccagtgctcccttctatgcccgcttggtggaaaccagttttagggatgtagacaagggggtcttagaggcagccaatgccattggagctaatgagttccaaattatttacaaggttttgatcccagaatcatcacctgctctcattgctggcttgaccaccactagtattgctgttttaggctttaccgctatggcgggagtcatcggtgctggtggtttagggaacctggcctacttgcaaggtttccagcggtccaacccagctgttactttagtggcaaccttagttattttagttttagtttttatcattcaaggtcttggtgacctgacagttaaattattagataaacgttaa

SEQ ID NO: 4484 - protein, 80 aa, Alloiococcus otitidis
MIPESSPALIAGLTTTSIAVLGFTAMAGVIGAGGLGNLAYLQGFQRSNPAVTLVATLVILVLVFIIQGLGDLTVKLLDKR

SEQ ID NO: 4485 - DNA, 708 bp, Alloiococcus otitidis; identical to SEQ ID NO: 4483
  CDS (109)..(705)

SEQ ID NO: 4486 - protein, 199 aa, Alloiococcus otitidis
MTLLSMIAVFVFGLLLGLLLFETQNKEGKFFQVFYYIVAVIVNIFRAIPFIILIVLLIPFTRSLLGTMTGPNAALPALILSSAPFYARLVETSFRDVDKGVLEAANAIGANEFQIIYKVLIPESSPALIAGLTTTSIAVLGFTAMAGVIGAGGLGNLAYLQGFQRSNPAVTLVATLVILVLVFIIQGLGDLTVKLLDKR

SEQ ID NO: 4487 - DNA, 708 bp, Alloiococcus otitidis; identical to SEQ ID NO: 4483
  CDS (7)..(705)

SEQ ID NO: 4488 - protein, 233 aa, Alloiococcus otitidis
MPNLFLASVDLSEFVAFENVNWPNVQQATVETIYMTLLSMIAVFVFGLLLGLLLFETQNKEGKFFQVFYYIVAVIVNIFRAIPFIILIVLLIPFTRSLLGTMTGPNAALPALILSSAPFYARLVETSFRDVDKGVLEAANAIGANEFQIIYKVLIPESSPALIAGLTTTSIAVLGFTAMAGVIGAGGLGNLAYLQGFQRSNPAVTLVATLVILVLVFIIQGLGDLTVKLLDKR

SEQ ID NO: 4489 - DNA, 1119 bp, Alloiococcus otitidis
  CDS (313)..(1116)
agagactggggcggagctttttttattgctacttatttcaatggtaaagaccctagcttacttgacctaggggaatttagtaggaggagtgaagaccgattgatcgaactgacagaagtttctaagatttttaagcagaacaagtctgaagtcaaggctgttgacaatgtttccttgtccattaagacaggggagatctttgggattattggttattctggtgccggcaagtcaaccttagtccggaccatcaacggcctagagaaagcttctggaggccaaatttccattaatggccaaaacttgtcccaaatgtctaacaaagacttgcggaaggcgagacaaaagatcggcatgattttccagcacttcaatattctttggtcccgtacagtcagggaaaacatcatgtttcccttagagattgcgggcgttggcaaggaagagcggatcaagcgagcagacgaattaatcaagttggttggtttagaaggtaaggaagatacttattcagcccaattgtccggtgggcaaaaacaaagggtagggatcgcccgggccttggccaatgacccagatgttttgctttgtgacgagtccacttctgccttggaccctaagacaactgacgatgttttaaacttactacttgaaatcaacaagaagtttagtttaaccatcgtgatcattacccacgaaatggaagtaatccggaaaatttgtgaccgggtcgccgtcatggatgcgggtgctgttgtggaggctggagatgctgacgaaatctttaagaatccgcaaaaaaacattaccaaacgctttattttacaaagtgaagatgacgacacagaaaaagccttgaaagactttattgcaagccagccccaaggccatgtcttcagtattcactatgatagagacaaggtccaggctcctttaatttcccaggccagtcgcaagtttgatattgatatcaatattatctcgggatcgatctattcaactaaggcttcgccttcaggtaccctctttgtccaagccttaggagatgatgaggctatcgaggcggccgaagaatttattagccagtcagcaaaagtggaggtgatctaccgtgcctaa

SEQ ID NO: 4490 - protein, 268 aa, Alloiococcus otitidis
MSNKDLRKARQKIGMIFQHFNILWSRTVRENIMFPLEIAGVGKEERIKRADELIKLVGLEGKEDTYSAQLSGGQKQRVGIARALANDPDVLLCDESTSALDPKTTDDVLNLLLEINKKFSLTIVIITHEMEVIRKICDRVAVMDAGAVVEAGDADEIFKNPQKNITKRFILQSEDDDTEKALKDFIASQPQGHVFSIHYDRDKVQAPLISQASRKFDIDINIISGSIYSTKASPSGTLFVQALGDDEAIEAAEEFISQSAKVEVIYRA

SEQ ID NO: 4491 - DNA, 1119 bp, Alloiococcus otitidis; identical to SEQ ID NO: 4489
  CDS (100)..(1116)

SEQ ID NO: 4492 - protein, 339 aa, Alloiococcus otitidis
MIELTEVSKIFKQNKSEVKAVDNVSLSIKTGEIFGIIGYSGAGKSTLVRTINGLEKASGGQISINGQNLSQMSNKDLRKARQKIGMIFQHFNILWSRTVRENIMFPLEIAGVGKEERIKRADELIKLVGLEGKEDTYSAQLSGGQKQRVGIARALANDPDVLLCDESTSALDPKTTDDVLNLLLEINKKFSLTIVIITHEMEVIRKICDRVAVMDAGAVVEAGDADEIFKNPQKNITKRFILQSEDDDTEKALKDFIASQPQGHVFSIHYDRDKVQAPLISQASRKFDIDINIISGSIYSTKASPSGTLFVQALGDDEAIEAAEEFISQSAKVEVIYRA

SEQ ID NO: 4493 - DNA, 396 bp, Alloiococcus otitidis
  CDS (97)..(393)
atactgaagacatggccttggggctggcttgcaataaagtctttcaaggctttttctgtgtcgtcatcttcactttgtaaaataaagcgtttggtaatgtttttttgcggattcttaaagatttcgtcagcatctccagcctccacaacagcacccgcatccatgacggcgacccggtcacaaattttccggattacttccatttcgtgggtaatgatcacgatggttaaactaaacttcttgttgatttcaagtagtaagtttaaaacatcgtcagttgtcttagggtccaaggcagaagtggactcgtcacaaagcaaaacatctgggtcattggccaaggcccgggcgatccctaccctttgtttttgcccaccggacaattgggctgaataa

SEQ ID NO: 4494 - protein, 99 aa, Alloiococcus otitidis
MFFCGFLKISSASPASTTAPASMTATRSQIFRITSISWVMITMVKLNFLLISSSKFKTSSVVLGSKAEVDSSQSKTSGSLAKARAIPTLCFCPPDNWAE

SEQ ID NO: 4495 - DNA, 396 bp, Alloiococcus otitidis; identical to SEQ ID NO: 4493
  CDS (91)..(393)

SEQ ID NO: 4496 - protein, 101 aa, Alloiococcus otitidis
MVMFFCGFLKISSASPASTTAPASMTATRSQIFRITSISWVMITMVKLNFLLISSSKFKTSSVVLGSKAEVDSSQSKTSGSLAKARAIPTLCFCPPDNWAE

SEQ ID NO: 4497 - DNA, 396 bp, Alloiococcus otitidis; identical to SEQ ID NO: 4493
  CDS (58)..(393)

SEQ ID NO: 4498 - protein, 112 aa, Alloiococcus otitidis
MSSSSLCKIKRLVMFFCGFLKISSASPASTTAPASMTATRSQIFRITSISWVMITMVKLNFLLISSSKFKTSSVVLGSKAEVDSSQSKTSGSLAKARAIPTLCFCPPDNWAE

SEQ ID NO: 4499 - DNA, 273 bp, Alloiococcus otitidis
  CDS (31)..(270)
aggggagttgatttgctcccgtccatattagtgtttaaacaaagtgaggtaaataaagtggcagatgtaagtaaggtgaatggtcaagcgacccaaagagcggagctacaccggcgaatttgggctattgctgatgacgttcgaggggcagtagacggctgggattttaagcagtacatattaggtattttattttaccggtttatttcagaaaacattactgaattttcaactttgctcgctaggaaaaggatgataagatcaagagtttaa

SEQ ID NO: 4500 - protein, 80 aa, Alloiococcus otitidis
MFKQSEVNKVADVSKVNGQATQRAELHRRIWAIADDVRGAVDGWDFKQYILGILFYRFISENITEFSTLLARKRMIRSRV

SEQ ID NO: 4501 - DNA, 570 bp, Alloiococcus otitidis
  CDS (13)..(567)
aggggaagacaaatgagtaaagaattgttgcaagatttagaaaacagaatgaccaaagccattgactctctaaactatcaactggggggtatccgggcaggacgtgccaatgctagcttagtggaacgggtacaggtcaactattatggggcgccaactcccttaaaccaattggctcaaatttcagttcctgaagcccgggttttattgatctcaccttatgacaaatcgaccctcaaggatattgaaacagccattcaaaagtctgatattggcatcccacctgctagtgatggggaagtgatccgcttggttgtaccagccttaacagaagaacggcggaaagaaattgccaaaaaagttggcgaggaagaagaaaaagccaaagtttccatccgaaatattcgccgggaaggcatggacagcttaaaaaaatcagaaaaaaacagtgaaatctctgaagacgaaaaaaaacgttacgaagaccaggtccaaaaactgaccgacaagtataccgaccaggccgaccaattgtctcgtcaaaaagaaaaagaaattctcgataactaa

SEQ ID NO: 4502 - protein, 185 aa, Alloiococcus otitidis
MSKELLQDLENRMTKAIDSLNYQLGGIRAGRANASLVERVQVNYYGAPTPLNQLAQISVPEARVLLISPYDKSTLKDIETAIQKSDIGIPPASDGEVIRLVVPALTEERRKEIAKKVGEEEEKAKVSIRNIRREGMDSLKKSEKNSEISEDEKKRYEDQVQKLTDKYTDQADQLSRQKEKEILDN

SEQ ID NO: 4503 - DNA, 765 bp, Alloiococcus otitidis
  CDS (34)..(762)
tccagattaattcttttgttaggagaagtatacatgagtgaaccaatctacaagcggattgtcctaaagctaagtggtgaagccctggctggggacaaggattttggcatcaacccgctcaccatccaaaagatttgccaggaaattaaagacgtctatgaactgggaattgaaattgctattgttgtcggtggtggcaatatctggcggggccaaaccgggtcagaaatgggcatggagcgggcccaagctgactatatgggcatgattgctaccattatgaatggtctagccctccaagacagcctggagaatgccggcgttcccacccgggtccaaacctccatcgagatgaaagaggtggccgagcaatacatcagacgacgagcgatccgccacttggaaaagggtcgggtggttatctttgcaggtggtaccggcaacccttacttctcaaccgacaccactgctgctttaagggctgctgagatcaaggctgatgtcattatgatggccaagaacaatgtagatggggtttattcggctgatccaatgaaagatgatgcagcggtcaaatatgacaagctcacctatcttgatattatcaaccagtcccttggggttatggacaccacagcttcaaccttaagcatggacaatgatattcccttattggtctttaagctcaatgaaaaaggcaatatcaagcgggcggtcctaggtgaagcaatcggaacaacagtaaaggggaagacaaatgagtaa

SEQ ID NO: 4504 - protein, 243 aa, Alloiococcus otitidis
MSEPIYKRIVLKLSGEALAGDKDFGINPLTIQKICQEIKDVYELGIEIAIVVGGGNIWRGQTGSEMGMERAQADYMGMIATIMNGLALQDSLENAGVPTRVQTSIEMKEVAEQYIRRRAIRHLEKGRVVIFAGGTGNPYFSTDTTAALRAAEIKADVIMMAKNNVDGVYSADPMKDDAAVKYDKLTYLDIINQSLGVMDTTASTLSMDNDIPLLVFKLNEKGNIKRAVLGEAIGTTVKGKTNE

SEQ ID NO: 4505 - DNA, 765 bp, Alloiococcus otitidis; identical to SEQ ID NO: 4503
  CDS (16)..(762)

SEQ ID NO: 4506 - protein, 249 aa, Alloiococcus otitidis
MLGEVYMSEPIYKRIVLKLSGEALAGDKDFGINPLTIQKICQEIKDVYELGIEIAIVVGGGNIWRGQTGSEMGMERAQADYMGMIATIMNGLALQDSLENAGVPTRVQTSIEMKEVAEQYIRRRAIRHLEKGRVVIFAGGTGNPYFSTDTTAALRAAEIKADVIMMAKNNVDGVYSADPMKDDAAVKYDKLTYLDIINQSLGVMDTTASTLSMDNDIPLLVFKLNEKGNIKRAVLGEAIGTTVKGKTNE

SEQ ID NO: 4507 - DNA, 891 bp, Alloiococcus otitidis
  CDS (70)..(888)
ggggcaaaaacattggctaatattaaagcagctcaagtgaaagaattacgagacaaagtcggcgtcggaatgatggatgccaaaaatgcactggtcgaaacagacggcgacctagacaaggccgttgaatacctgcgcgaaaaaggtgtagctaaggcagctaaaaaagcaaaccgaattgctgcggaaggcttaaccaagactaaagtgaacggcaatacagctgtcttggtcgaagtaaactctgagacagactttgtttctaaaaacgacaaattcttgcaactggttgaagacattaccaatgcggttttggaaaacaaaccagctaacatggaagaagccatgcaattggacatcaaaggtcaaaccattgaagacaccatcactgaagctacaactactattggtgaaaaaatcacctttagacggtttgaagttgtagagaaaaatgatgaccaagtcttcggtgactatgaacacatgggtggccgtatttccgtcttaaccctgattgacggatcagatgttgaagtggctcgtaacgttgccatgcacgtggccgctattaacccgctttatgttaccagtgaagatgtgcctaaagacagacgggatgaagaacaaaaaatcttgactgaacaagctaaaaatgaaggcaaacctgaccacatcgttgaaaaaatggtggaaggtcgcctcaacaaatggttgtctgaaatttccttgactgaacaagattatgtgaaagacccagacgaaactgtcaaagactacttggatagtcatgactctggcatccaaaccttcttccgttatgaagttggggaaggtattgagaaaaaagaagaagactttgcagctgaagtccaatcacaaattaacaattaa

SEQ ID NO: 4508 - protein, 273 aa, Alloiococcus otitidis
MMDAKNALVETDGDLDKAVEYLREKGVAKAAKKANRIAAEGLTKTKVNGNTAVLVEVNSETDFVSKNDKFLQLVEDITNAVLENKPANMEEAMQLDIKGQTIEDTITEATTTIGEKITFRRFEVVEKNDDQVFGDYEHMGGRISVLTLIDGSDVEVARNVAMHVAAINPLYVTSEDVPKDRRDEEQKILTEQAKNEGKPDHIVEKMVEGRLNKWLSEISLTEQDYVKDPDETVKDYLDSHDSGIQTFFRYEVGEGIEKKEEDFAAEVQSQINN

SEQ ID NO: 4509 - DNA, 891 bp, Alloiococcus otitidis; identical to SEQ ID NO: 4507
  CDS (37)..(888)

SEQ ID NO: 4510 - protein, 284 aa, Alloiococcus otitidis
MKELRDKVGVGMMDAKNALVETDGDLDKAVEYLREKGVAKAAKKANRIAAEGLTKTKVNGNTAVLVEVNSETDFVSKNDKFLQLVEDITNAVLENKPANMEEAMQLDIKGQTIEDTITEATTTIGEKITFRRFEVVEKNDDQVFGDYEHMGGRISVLTLIDGSDVEVARNVAMHVAAINPLYVTSEDVPKDRRDEEQKILTEQAKNEGKPDHIVEKMVEGRLNKWLSEISLTEQDYVKDPDETVKDYLDSHDSGIQTFFRYEVGEGIEKKEEDFAAEVQSQINN

SEQ ID NO: 4511 - DNA, 891 bp, Alloiococcus otitidis; identical to SEQ ID NO: 4507
  CDS (13)..(888)

SEQ ID NO: 4512 - protein, 292 aa, Alloiococcus otitidis
MANIKAAQVKELRDKVGVGMMDAKNALVETDGDLDKAVEYLREKGVAKAAKKANRIAAEGLTKTKVNGNTAVLVEVNSETDFVSKNDKFLQLVEDITNAVLENKPANMEEAMQLDIKGQTIEDTITEATTTIGEKITFRRFEVVEKNDDQVFGDYEHMGGRISVLTLIDGSDVEVARNVAMHVAAINPLYVTSEDVPKDRRDEEQKILTEQAKNEGKPDHIVEKMVEGRLNKWLSEISLTEQDYVKDPDETVKDYLDSHDSGIQTFFRYEVGEGIEKKEEDFAAEVQSQINN

SEQ ID NO: 4513 - DNA, 333 bp, Alloiococcus otitidis
  CDS (7)..(330)
cctttgatgtccaattgcatggcttcttccatgttagctggtttgttttccaaaaccgcattggtaatgtcttcaaccagttgcaagaatttgtcgtttttagaaacaaagtctgtctcagagtttacttcgaccaagacagctgtattgccgttcactttagtcttggttaagccttccgcagcaattcggtttgcttttttagctgccttagctacacctttttcgcgcaggtattcaacggccttgtctaggtcgccgtctgtttcgaccagtgcatttttggcatccatcattccgacgccgactttgtctcgtaattctttcacttga

SEQ ID NO: 4514 - protein, 108 aa, Alloiococcus otitidis
MSNCMASSMLAGLFSKTALVMSSTSCKNLSFLETKSVSEFTSTKTAVLPFTLVLVKPSAAIRFAFLAALATPFSRRYSTALSRSPSVSTSAFLASIIPTPTLSRNSFT

SEQ ID NO: 4515 - DNA, 333 bp, Alloiococcus otitidis; identical to SEQ ID NO: 4513
  CDS (4)..(330)

SEQ ID NO: 4516 - protein, 109 aa, Alloiococcus otitidis
MMSNCMASSMLAGLFSKTALVMSSTSCKNLSFLETKSVSEFTSTKTAVLPFTLVLVKPSAAIRFAFLAALATPFSRRYSTALSRSPSVSTSAFLASIIPTPTLSRNSFT

SEQ ID NO: 4517 - DNA, 882 bp, Alloiococcus otitidis
  CDS (196)..(879)
acagttaatcagaccaaaatcaaacacaccaatggattggccagagggtgctttacttgtaaagtgtctggtcactcgaagttggtggaagaaaaaccaaaatggaggaatttatttatgtcagttgttaccatgaaacaattactcgaatctggtgtccactttggccaccaaacccgtcgttggaaccctaagatgaaaccatatatctttactgaacgtaacggtatctacattatcgacttacaacaaaccgttaacatgattgatgatgcttataactttatccgagacatcgctgctgatggtggtaatgtcttatttgttggtaccaaaaaacaagctcaagaatccatcaaagaagaggctgaacgtgttggtgccttttacgttaacaaccgttggctcggtgggaccttaaccaactgggacaccatctctaaacggattgaccgcttgaaagagcttgaagaaatggaagaagatggtactttcgaagtccttcctaaaaaagaagttggtatcttaattaaagaacgcgaaaaattgcaatacaacctaggcggtattaaagacatgcctggcttgccagatgccatttttgttgttgaccctcgcaaagaggatattgcggttaaagaagcacgcaaattgaacattccaattgtggctatggtagacaccaactgtgacccagatgaaatcgatgtcattattccatcaaatgatgatgctatccgtgccgttaaattgattactaaaaccatggctgatgccttcgttgaaggtaagcaaggcgaggaagaagtagaagaagaaatcgctagttcagaaagcttggaagaaatggttgaagccgttgaaggtgacaacgaagaataa

SEQ ID NO: 4518 - protein, 228 aa, Alloiococcus otitidis
MKPYIFTERNGIYIIDLQQTVNMIDDAYNFIRDIAADGGNVLFVGTKKQAQESIKEEAERVGAFYVNNRWLGGTLTNWDTISKRIDRLKELEEMEEDGTFEVLPKKEVGILIKEREKLQYNLGGIKDMPGLPDAIFVVDPRKEDIAVKEARKLNIPIVAMVDTNCDPDEIDVIIPSNDDAIRAVKLITKTMADAFVEGKQGEEEVEEEIASSESLEEMVEAVEGDNEE

SEQ ID NO: 4519 - DNA, 882 bp, Alloiococcus otitidis; identical to SEQ ID NO: 4517
  CDS (118)..(879)

SEQ ID NO: 4520 - protein, 254 aa, Alloiococcus otitidis
MSVVTMKQLLESGVHFGHQTRRWNPKMKPYIFTERNGIYIIDLQQTVNMIDDAYNFIRDIAADGGNVLFVGTKKQAQESIKEEAERVGAFYVNNRWLGGTLTNWDTISKRIDRLKELEEMEEDGTFEVLPKKEVGILIKEREKLQYNLGGIKDMPGLPDAIFVVDPRKEDIAVKEARKLNIPIVAMVDTNCDPDEIDVIIPSNDDAIRAVKLITKTMADAFVEGKQGEEEVEEEIASSESLEEMVEAVEGDNEE

SEQ ID NO: 4521 - DNA, 882 bp, Alloiococcus otitidis; identical to SEQ ID NO: 4517
  CDS (64)..(879)

SEQ ID NO: 4522 - protein, 272 aa, Alloiococcus otitidis
MSGHSKLVEEKPKWRNLFMSVVTMKQLLESGVHFGHQTRRWNPKMKPYIFTERNGIYIIDLQQTVNMIDDAYNFIRDIAADGGNVLFVGTKKQAQESIKEEAERVGAFYVNNRWLGGTLTNWDTISKRIDRLKELEEMEEDGTFEVLPKKEVGILIKEREKLQYNLGGIKDMPGLPDAIFVVDPRKEDIAVKEARKLNIPIVAMVDTNCDPDEIDVIIPSNDDAIRAVKLITKTMADAFVEGKQGEEEVEEEIASSESLEEMVEAVEGDNEE

SEQ ID NO: 4523 - DNA, 882 bp, Alloiococcus otitidis; identical to SEQ ID NO: 4517
  CDS (37)..(879)

SEQ ID NO: 4524 - protein, 281 aa, Alloiococcus otitidis
MARGCFTCKVSGHSKLVEEKPKWRNLFMSVVTMKQLLESGVHFGHQTRRWNPKMKPYIFTERNGIYIIDLQQTVNMIDDAYNFIRDIAADGGNVLFVGTKKQAQESIKEEAERVGAFYVNNRWLGGTLTNWDTISKRIDRLKELEEMEEDGTFEVLPKKEVGILIKEREKLQYNLGGIKDMPGLPDAIFVVDPRKEDIAVKEARKLNIPIVAMVDTNCDPDEIDVIIPSNDDAIRAVKLITKTMADAFVEGKQGEEEVEEEIASSESLEEMVEAVEGDNEE

SEQ ID NO: 4525 - DNA, 528 bp, Alloiococcus otitidis
  CDS (148)..(525)
aataaagtgttcaaaattcgcttaacggttaattattcttcgttgtcaccttcaacggcttcaaccatttcttccaagctttctgaactagcgatttcttcttctacttcttcctcgccttgcttaccttcaacgaaggcatcagccatggttttagtaatcaatttaacggcacggatagcatcatcatttgatggaataatgacatcgatttcatctgggtcacagttggtgtctaccatagccacaattggaatgttcaatttgcgtgcttctttaaccgcaatatcctctttgcgagggtcaacaacaaaaatggcatctggcaagccaggcatgtctttaataccgcctaggttgtattgcaatttttcgcgttctttaattaagataccaacttcttttttaggaaggacttcgaaagtaccatcttcttccatttcttcaagctctttcaagcggtcaatccgtttagagatggtgtcccagttggttaaggtcccaccgagccaacggttgttaacgtaa

SEQ ID NO: 4526 - protein, 126 aa, Alloiococcus otitidis
MVLVINLTARIASSFDGIMTSISSGSQLVSTIATIGMFNLRASLTAISSLRGSTTKMASGKPGMSLIPPRLYCNFSRSLIKIPTSFLGRTSKVPSSSISSSSFKRSIRLEMVSQLVKVPPSQRLLT

SEQ ID NO: 4527 - DNA, 528 bp, Alloiococcus otitidis; identical to SEQ ID NO: 4525
  CDS (43)..(525)

SEQ ID NO: 4528 - protein, 161 aa, Alloiococcus otitidis
MSPSTASTISSKLSELAISSSTSSSPCLPSTKASAMVLVINLTARIASSFDGIMTSISSGSQLVSTIATIGMFNLRASLTAISSLRGSTTKMASGKPGMSLIPPRLYCNFSRSLIKIPTSFLGRTSKVPSSSISSSSFKRSIRLEMVSQLVKVPPSQRLLT

SEQ ID NO: 4529 - DNA, 528 bp, Alloiococcus otitidis; identical to SEQ ID NO: 4525
  CDS (7)..(525)

SEQ ID NO: 4530 - protein, 173 aa, Alloiococcus otitidis
MFKIRLTVNYSSLSPSTASTISSKLSELAISSSTSSSPCLPSTKASAMVLVINLTARIASSFDGIMTSISSGSQLVSTIATIGMFNLRASLTAISSLRGSTTKMASGKPGMSLIPPRLYCNFSRSLIKIPTSFLGRTSKVPSSSISSSSFKRSIRLEMVSQLVKVPPSQRLLT

SEQ ID NO: 4531 - DNA, 639 bp, Alloiococcus otitidis
  CDS (22)..(636)
caatttaaaggagtcacttttatgttatttagatttcttgtcaatttgatttatggattactgatcatcgtgaacggtcgcctagaagtcatcgggaaggagaacctaccggacaaggatacctatgtcctggttgcccctcaccggacttggttggaccctgtttttatcgccatcgctacccggccgcgggaatttgtcatcatggccaaggaagaacttttcaatgtccctatctttggttggatcatcaaaaaaatcggagccttcccggtcaaccgcgacaagccagggccttctgtcattaaaaccccggtcaaggccttgaaagaaagtgaccgggctcttatgatcttcccgactggtacaagacattccactgaactcaagggcggagccactaccatcgcgaagttgagcaagaagccagtcatcacagcggtctacgacggcccgcgcaccatcaaagacctgttaaaaagaaagaaaacccgggtcatcttcggccaaggatttgaggtccaaagaagagtggaaggagtctcggacctggaccaatactacatggacaaaatgcaggcatcctttgaccagttagaccaagaattaaaggaccgggcttcacactctgaaagctaa

SEQ ID NO: 4532 - protein, 205 aa, Alloiococcus otitidis
MLFRFLVNLIYGLLIIVNGRLEVIGKENLPDKDTYVLVAPHRTWLDPVFIAIATRPREFVIMAKEELFNVPIFGWIIKKIGAFPVNRDKPGPSVIKTPVKALKESDRALMIFPTGTRHSTELKGGATTIAKLSKKPVITAVYDGPRTIKDLLKRKKTRVIFGQGFEVQRRVEGVSDLDQYYMDKMQASFDQLDQELKDRASHSES

SEQ ID NO: 4533 - DNA, 258 bp, Alloiococcus otitidis
  CDS (31)..(255)
ggtagattaagtcaaagaagggatgaaagcatgaatttagcactagccattatcttaattatcttagccttaattggggggttaattgggggctttttcctagcccggaagtatatgatggattatttcgaaaaaaatccgccaattgatgaagacatgttaagactcatgatgcttcagatgggccaaaaaccatctgagcggaagattagacagatgatgacccagattaagtccaagtccaaaaaagataaataa

SEQ ID NO: 4534 - protein, 75 aa, Alloiococcus otitidis
MNLALAIILIILALIGGLIGGFFLARKYMMDYFEKNPPIDEDMLRLMMLQMGQKPSERKIRQMMTQIKSKSKKDK

SEQ ID NO: 4535 - DNA, 1932 bp, Alloiococcus otitidis
  CDS (385)..(1929)
cacatgtttgatcgaactgaccaattagcagttgacaccatccgtttgttgagtgtagaccaagttgaagaagccaattccggccaccccggtctgcccatgggagctgctcccatggcttataccttgtggtccaagcacctgtcacttaacccagacaaccctaactggattaaccgcgaccgttttgtcttgtcggctggacacgggtcagctatgctttactccttgcttcatttgtcaggttttgacgtcagcctagaagacttgaagaattttcgccagcttgggagtaaaacccctggccaccccgaagtcaaccagacgccaggtgtggaaactactaccgggcctttgggtcaaggatttgctaatgctgttggcatggccatggccgaagctcacttaagagagctttacaatgaaccaggctatcctattatcgaccactacacctactgcctggttggagatggagacttgcaagaaggaatttcctatgaagcaggcagtttggcaggacatttaaacttaaataaactcgttgtcctctatgactccaacgatgtccaattggatggaccggtcagcaaggccttttccgaagacatcaaaggccggtttgaggcccagggttgggactatatctttgtggaagatgggaccgaccttaaccagatccatgcggccattgacaaagccaagcaggtggacaagccatccttgattgaaatcaagaccgtaattggtcaaggagctccggaccaagggaaagctgccgttcacggttctccgattggcaaggaaggccggcaaaaagcagttgaatcctatgcttggccttaccaagagaacttttatattcctgaagaagtaaaagaccggtttgatgagaccattatcaaagagggccaggctaaaaaccaggcctgggatgatttgtttgcccgatataaagaagaataccccgaaaaagcccaagccttagataaagccttggctagagacctacctgacaattgggagcaagccttgccgacttactcagctggagacgataaagcaacccgggccttgtctaatgaagtcatcaatgccatcgctcaatccttgcctaacttctggggcgggtcagctgacttgtccgggtctaacaaaaccgttatcgaccagggcgaagacttcgcaaaagacaattacacaggccgtaacatttggtatggggttcgagagcatgccatggcttcagccttaaatggtattatcctccacggcggaacttattcctttgtttcaactttctttgtcttttcagactatctcagaccagctgtccgcttggcggccctctcccatgtcccggccatttatgtcttaacccacgactccgtagcggtgggggaagacgggccgacccacgagccagtcgagcaattggccagcttccgggccatgcctaacctgaatgtgatccgtccagctgacggcaatgagacggccgctgcctggaagattgccattgagtccaaggaccgaccaaccatgatcgtcttgacccggcaaggtctacctggtttgaaccagaccaaagaagaccggtttgaacatgttaaacacggtggctacgttatttctagccaagaaggcaacaagccagatggtattttactagccagtggatctgaacttgccctaaccttacaagcgcaagaagcgttaagacaagaggggattgatgtttctgtagtctctatgccatcttttaacctttttgatgaacaaagtgaagcttataaagaaaccgtcctaccaagcaaggtgaccaaacgcctcgctattgaaatgggggcttcctttggttgggaccgctacaccggtcttgaaggcaatagtttagctatcgacaagttcggctcgagctgggccaggtaa

SEQ ID NO: 4536 - protein, 515 aa, Alloiococcus otitidis
MAMAEAHLRELYNEPGYPIIDHYTYCLVGDGDLQEGISYEAGSLAGHLNLNKLVVLYDSNDVQLDGPVSKAFSEDIKGRFEAQGWDYIFVEDGTDLNQIHAAIDKAKQVDKPSLIEIKTVIGQGAPDQGKAAVHGSPIGKEGRQKAVESYAWPYQENFYIPEEVKDRFDETIIKEGQAKNQAWDDLFARYKEEYPEKAQALDKALARDLPDNWEQALPTYSAGDDKATRALSNEVINAIAQSLPNFWGGSADLSGSNKTVIDQGEDFAKDNYTGRNIWYGVREHAMASALNGIILHGGTYSFVSTFFVFSDYLRPAVRLAALSHVPAIYVLTHDSVAVGEDGPTHEPVEQLASFRAMPNLNVIRPADGNETAAAWKIAIESKDRPTMIVLTRQGLPGLNQTKEDRFEHVKHGGYVISSQEGNKPDGILLASGSELALTLQAQEALRQEGIDVSVVSMPSFNLFDEQSEAYKETVLPSKVTKRLAIEMGASFGWDRYTGLEGNSLAIDKFGSSWAR

SEQ ID NO: 4537 - DNA, 1932 bp, Alloiococcus otitidis; identical to SEQ ID NO: 4535
  CDS (4)..(1929)

SEQ ID NO: 4538 - protein, 642 aa, Alloiococcus otitidis
MFDRTDQLAVDTIRLLSVDQVEEANSGHPGLPMGAAPMAYTLWSKHLSLNPDNPNWINRDRFVLSAGHGSAMLYSLLHLSGFDVSLEDLKNFRQLGSKTPGHPEVNQTPGVETTTGPLGQGFANAVGMAMAEAHLRELYNEPGYPIIDHYTYCLVGDGDLQEGISYEAGSLAGHLNLNKLVVLYDSNDVQLDGPVSKAFSEDIKGRFEAQGWDYIFVEDGTDLNQIHAAIDKAKQVDKPSLIEIKTVIGQGAPDQGKAAVHGSPIGKEGRQKAVESYAWPYQENFYIPEEVKDRFDETIIKEGQAKNQAWDDLFARYKEEYPEKAQALDKALARDLPDNWEQALPTYSAGDDKATRALSNEVINAIAQSLPNFWGGSADLSGSNKTVIDQGEDFAKDNYTGRNIWYGVREHAMASALNGIILHGGTYSFVSTFFVFSDYLRPAVRLAALSHVPAIYVLTHDSVAVGEDGPTHEPVEQLASFRAMPNLNVIRPADGNETAAAWKIAIESKDRPTMIVLTRQGLPGLNQTKEDRFEHVKHGGYVISSQEGNKPDGILLASGSELALTLQAQEALRQEGIDVSVVSMPSFNLFDEQSEAYKETVLPSKVTKRLAIEMGASFGWDRYTGLEGNSLAIDKFGSSWAR

SEQ ID NO: 4539 - DNA, 255 bp, Alloiococcus otitidis
  CDS (13)..(252)
ggaggacttagcgtgttatctcaagacaaacttgaccggattaatgtattagctcgtaaggaaagaaccgaggaagggctaagcccagaagaaaaagaagaacaagcttctctaagacaagaatatatcaaagcttttcgggccaacttcagaggaactttggaaaacacaaaaatcatcgacccggaaggcaaggatgtgacacctgataaaattaaaaaaatccaaaaagatagaggacttcataaccgttaa

SEQ ID NO: 4540 - protein, 80 aa, Alloiococcus otitidis
MLSQDKLDRINVLARKERTEEGLSPEEKEEQASLRQEYIKAFRANFRGTLENTKIIDPEGKDVTPDKIKKIQKDRGLHNR

SEQ ID NO: 4541 - DNA, 687 bp, Alloiococcus otitidis
  CDS (16)..(684)
tatggtatactaataatgactatagacgagaaaggaagtgccagcatggctaaacgtgggcgcaaaggagaaaaacaattggaaatcctcagctatatctaccaagaagtcagtgaaaaaggctacccaccgactgtccgagaaatcggcaatgccacccagctgtcttctacctctactgtccacggccacttggctaacctagccaaggcaggtttcatcacccgcgactcttccaagccccgggccatggaggtcaccccactcggtctcaataaactaggcatcgatgaagggcaagatgacaagcacatccctttattgggtgtggttacagcaggtgagccaattttagcctatgaagaggccaatgacttcttccccctacctaatgacctagagttagagcggggcaacttgtttatgctgactatatcaggggatagtatggtcaatgcagggatttttgacggcgaccaggtcattgtccgccagcaagcagatgcctctaacggggatatcgttatcgccatgactgaggaaaatgaagctacctgcaaacgtttctacaaggaaaaagaccatatccgccttcaacctgaaaatgaccggctcgaccctatcattttaaaccaagtatccatcctgggtaaggtcatctctctataccgtagccaggtcttttag

SEQ ID NO: 4542 - protein, 223 aa, Alloiococcus otitidis
MTIDEKGSASMAKRGRKGEKQLEILSYIYQEVSEKGYPPTVREIGNATQLSSTSTVHGHLANLAKAGFITRDSSKPRAMEVTPLGLNKLGIDEGQDDKHIPLLGVVTAGEPILAYEEANDFFPLPNDLELERGNLFMLTISGDSMVNAGIFDGDQVIVRQQADASNGDIVIAMTEENEATCKRFYKEKDHIRLQPENDRLDPIILNQVSILGKVISLYRSQVF

SEQ ID NO: 4543 - DNA, 381 bp, Alloiococcus otitidis
  CDS (16)..(378)
aagaaggagatttttatgtcagttagtccccaagaatttttgcaattagctgaaagttttaatgaagttaccccagaaaaagctgaagaactcttagaagcaggccaaagcaacatcgtctttgtgggtcgggaaacctgccccttctgttgccaatttattcctcgtctacaccaagttgctcaagaccaagacttgaccatcaatttcctccactcccaacatcctgactacttggaagctatctcagattttagggaaaaatacgaggttccaactgtccctgccctcctctactctgatgattcaacagatggtgtcaaatcaattagcgacagtagcatgagtgaagccgatattaaaagctttattaacttgtaa

SEQ ID NO: 4544 - protein, 121 aa, Alloiococcus otitidis
MSVSPQEFLQLAESFNEVTPEKAEELLEAGQSNIVFVGRETCPFCCQFIPRLHQVAQDQDLTINFLHSQHPDYLEAISDFREKYEVPTVPALLYSDDSTDGVKSISDSSMSEADIKSFINL

SEQ ID NO: 4545 - DNA, 1101 bp, Alloiococcus otitidis
  CDS (61)..(1098)
cccaatacgattaacagacaagaacaaagggcatggggtggtaatgtgaaaaagcaaattatgcctaaatttgatgcaaaaaaaggattagaaatcggcttatacaccattggcgaccacttgttccaagccggactcagccacttgtccgttaaagaccggatcgaccagatccttgatttaggaaagatggctgaccaagcaggtttggctattttccaagtgggcgagtcacaccaggaagactttgtctcttccgcccacctcatcctcttggcagccattgccagccaaaccgacaaaatcaaactggcttccggggccactactattagtacaggagaccccgtccaagtttttgagcaagcggctaccattgacctcctgtcccgagagcggatggagttagtctgcggacggtcggcccgggttggaaattttaagacacaagactatgacttagaccaatacgaagagttgtttgaggaaaaatttgaccgcctacttaccatcaacacccaagcctttccaagccaggtagataaaaaggaggaagggcaatccttggtatggccccgaccagaccgtcctgaaaagggcctgcccatttggcaagctaattctggtagtctccaatcagcccttcaggcagcccggagaggggttcctctccacctaatgcaagttagtggccaggttgattactaccaagacttgttccagtcttaccaggaagaagccaaggcttatggccatggaaagttgccgatcgcaacggccagtttcatgatggtcaaagaccaaagagaccaagccattcacaaatacctgcctaagattaaagagggtatggcacaaacgcggacgtcttatctagatgaattagaagttaaggatgtcgcaagcgtcgaccatgttttaaacattgggtctcctgcttctgttgtggagaaaatcctcaaccaatatgagcacttccaccatgaccgctatgtcgcccaagtagacttcgctggggtctccttagatgatatcaaggaaaccattgactacttaggggagaagattatccctgaagtgcaaaaatataccaaaaaataa

SEQ ID NO: 4546 - protein, 346 aa, Alloiococcus otitidis
MPKFDAKKGLEIGLYTIGDHLFQAGLSHLSVKDRIDQILDLGKMADQAGLAIFQVGESHQEDFVSSAHLILLAAIASQTDKIKLASGATTISTGDPVQVFEQAATIDLLSRERMELVCGRSARVGNFKTQDYDLDQYEELFEEKFDRLLTINTQAFPSQVDKKEEGQSLVWPRPDRPEKGLPIWQANSGSLQSALQAARRGVPLHLMQVSGQVDYYQDLFQSYQEEAKAYGHGKLPIATASFMMVKDQRDQAIHKYLPKIKEGMAQTRTSYLDELEVKDVASVDHVLNIGSPASVVEKILNQYEHFHHDRYVAQVDFAGVSLDDIKETIDYLGEKIIPEVQKYTKK

SEQ ID NO: 4547 - DNA, 1101 bp, Alloiococcus otitidis; identical to SEQ ID NO: 4545
  CDS (46)..(1098)

SEQ ID NO: 4548 - protein, 351 aa, Alloiococcus otitidis
MKKQIMPKFDAKKGLEIGLYTIGDHLFQAGLSHLSVKDRIDQILDLGKMADQAGLAIFQVGESHQEDFVSSAHLILLAAIASQTDKIKLASGATTISTGDPVQVFEQAATIDLLSRERMELVCGRSARVGNFKTQDYDLDQYEELFEEKFDRLLTINTQAFPSQVDKKEEGQSLVWPRPDRPEKGLPIWQANSGSLQSALQAARRGVPLHLMQVSGQVDYYQDLFQSYQEEAKAYGHGKLPIATASFMMVKDQRDQAIHKYLPKIKEGMAQTRTSYLDELEVKDVASVDHVLNIGSPASVVEKILNQYEHFHHDRYVAQVDFAGVSLDDIKETIDYLGEKIIPEVQKYTKK

SEQ ID NO: 4549 - DNA, 516 bp, Alloiococcus otitidis
  CDS (1)..(513)
atgaactataaagattatattgccaatgttccagactttcctgaaaaggggatcattttcagagacatttctccactgatggctaatggcccagtcttccaagaggctatccaagatattgtcgactttgctcaggataaggaagtcgaagtgatcgtaggtccagaagccagaggttttattgtcggttgtccggtagcctatgaattggggattggctttataccagcccgcaaaaagggcaagttaccccgagaaaccatggaaaaatcttacggcctagaatacggggatagtgtcctacaaattcacaaggatgccatccaacccggccaaaaagttttggtttgtgacgacttgttagccactggcgggaccatcgcagccaccattgacttggttgaagacttaggaggtcaggttgtcggcactgcctttttgattgaactcttaggtttaaaaggcagagacaagatcaaagactatgacctcttaagcttaacccaatacgattaa

SEQ ID NO: 4550 - protein, 171 aa, Alloiococcus otitidis
MNYKDYIANVPDFPEKGIIFRDISPLMANGPVFQEAIQDIVDFAQDKEVEVIVGPEARGFIVGCPVAYELGIGFIPARKKGKLPRETMEKSYGLEYGDSVLQIHKDAIQPGQKVLVCDDLLATGGTIAATIDLVEDLGGQVVGTAFLIELLGLKGRDKIKDYDLLSLTQYD

SEQ ID NO: 4551 - DNA, 456 bp, Alloiococcus otitidis
  CDS (76)..(453)
tcttgtgtcttaaaatttccaacccgggccgaccgtccgcagactaactccatccgctctcgggacaggaggtcaatggtagccgcttgctcaaaaacttggacggggtctcctgtactaatagtagtggccccggaagccagtttgattttgtcggtttggctggcaatggctgccaagaggatgaggtgggcggaagagacaaagtcttcctggtgtgactcgcccacttggaaaatagccaaacctgcttggtcagccatctttcctaaatcaaggatctggtcgatccggtctttaacggacaagtggctgagtccggcttggaacaagtggtcgccaatggtgtataagccgatttctaatcctttttttgcatcaaatttaggcataatttgctttttcacattaccaccccatgccctttgttcttgtctgttaatcgtattgggttaa

SEQ ID NO: 4552 - protein, 126 aa, Alloiococcus otitidis
MVAACSKTWTGSPVLIVVAPEASLILSVWLAMAAKRMRWAEETKSSWCDSPTWKIAKPAWSAIFPKSRIWSIRSLTDKWLSPAWNKWSPMVYKPISNPFFASNLGIICFFTLPPHALCSCLLIVLG

SEQ ID NO: 4553 - DNA, 2322 bp, Alloiococcus otitidis
  CDS (487)..(2319)
actaaaggtggatccagattgagccaattaaattggaagttaaatacagaagtagacaaggacttagtcaaagacctagggggagacttgccttattccgatcttttcttagagctttgtctgtctaggggcctagatacagtagaagctatccaatcctttatcgccaaagatccaagtcaatttcacgacccaagctccttgtatgagattgacaaggcagggaatcggattttcaaagcagtagaagctggcgaaaagatcctgatttacggggactatgatgccgatggagtgacgtcaacagctattttatacgaatgcctcctgaccttgggagggctggtgacctactatatacccgaccgctttaatgacggctatgggcctaatgctgatcgctaccaggaatttattgaccagggaattgacctgattataaccgttgacaatggagtggctggccatgaggcggtggacttggccatgagtcagggaattgacgtcatcatcagtgaccaccacggcctgccagaccagctaccggatgccttggcagtggtccatccagcccacccccaaggagactatcctttccaagacttagctggggctggcgtggccttaaaattaagccaatatctattgggggaagtccctcaagaaatgttggacctagcagcaattgggaccgtagcagacatggtctctttgaccggagaaaaccgaactttggtccagtttggcctggaccaattaaaagagagtcaacgattgggcttgagacggttgatcacagacttagctattcctttctcggaaattgacgaagagacaatttcctttaaacttgcccctgttctgaacgcagtcggtcgtttggaggatgccaaccaggttgttgaactcttgactagctttgaagaagaaagggttgctagcctgtcccagcactttatccaggtcaatgaagaccgtaagaccttggtcaaggaaagtgtagcagaagccttgacctccttaaacccaaacgatcatattcacatcgtcaaggctgaccactggcaccagggtgtccttggtattatggccagtcggatcgttaatgaaaccggcaagcctgctatagtccttaaggaatttaagaaccaaggcattgtcaaaggatcagcccggtcagtggaaaattttgacctctttgctgcttgtagtgaagtgagagagttatttgtcagttttggtggccaccaaatggctgctggaatgaccttagagaccaatcgtttagatgaattaagggacttcctcaaccaaaggctagcccagctgaaagaagaaatagacatcaggcctagcctggccattgatggtgaaataagtcctgaccaggtcaccttggccaccattcgcgaacttaacttgctcaaaccttttggccaagacaatccaaaacctcaatttattcttaagaatccgccgattaaagaggttagacgaatcggccaggataagagccacctgaaattaatactagacgatcaagatcggaagctagaagggattggcttttccctagggcatttggcagatttccttgattcaaaagcccaatgccagcttgtggctaacctggataaaaatgtctggcagaaccaagccaaggcccagctgatgattcaagatattcggctcttgtctgcaagaatcattgacaaaagaaccaaccagctgaaaaaatctctttttacccggactaaggcttcttatatctgctttaaccaggctattgccagccaggtcaagccttatcttccaagccaggcccagcttttaacagctcaagaagcggaggcaggtcaatccttgctggaagaggtctacttggtagactgtcctcagtcattgggccagtttaaggaactcttgccccagataagcgataagcaggttgttctttactttttcaaaccatccagcctctattttaacggcctaccccagccagaagaattcaaccgggtttacaagtacttaattggccacaaaagtcttccccttgcccaggctcagtcccgcttgccaaactatcttcagatgacttctgtcacttttaatcttgtcattcaggtgtttttggaagtaaactttgttaaaatagaaagtggacgcttactctttgaaggtagtcatcaaaagattgaccttgaagcaacgtctacttaccagtccatgcaagcggctatggaggcggaagaagccttactctttagcccaaaagaccaagtgcggtcttactttgatgcagagttaaataaagaataa

SEQ ID NO: 4554 - protein, 611 aa, Alloiococcus otitidis
MSQGIDVIISDHHGLPDQLPDALAVVHPAHPQGDYPFQDLAGAGVALKLSQYLLGEVPQEMLDLAAIGTVADMVSLTGENRTLVQFGLDQLKESQRLGLRRLITDLAIPFSEIDEETISFKLAPVLNAVGRLEDANQVVELLTSFEEERVASLSQHFIQVNEDRKTLVKESVAEALTSLNPNDHIHIVKADHWHQGVLGIMASRIVNETGKPAIVLKEFKNQGIVKGSARSVENFDLFAACSEVRELFVSFGGHQMAAGMTLETNRLDELRDFLNQRLAQLKEEIDIRPSLAIDGEISPDQVTLATIRELNLLKPFGQDNPKPQFILKNPPIKEVRRIGQDKSHLKLILDDQDRKLEGIGFSLGHLADFLDSKAQCQLVANLDKNVWQNQAKAQLMIQDIRLLSARIIDKRTNQLKKSLFTRTKASYICFNQAIASQVKPYLPSQAQLLTAQEAEAGQSLLEEVYLVDCPQSLGQFKELLPQISDKQVVLYFFKPSSLYFNGLPQPEEFNRVYKYLIGHKSLPLAQAQSRLPNYLQMTSVTFNLVIQVFLEVNFVKIESGRLLFEGSHQKIDLEATSTYQSMQAAMEAEEALLFSPKDQVRSYFDAELNKE

SEQ ID NO: 4555 - DNA, 2322 bp, Alloiococcus otitidis; identical to SEQ ID NO: 4553
  CDS (295)..(2319)

SEQ ID NO: 4556 - protein, 675 aa, Alloiococcus otitidis
MTSTAILYECLLTLGGLVTYYIPDRFNDGYGPNADRYQEFIDQGIDLIITVDNGVAGHEAVDLAMSQGIDVIISDHHGLPDQLPDALAVVHPAHPQGDYPFQDLAGAGVALKLSQYLLGEVPQEMLDLAAIGTVADMVSLTGENRTLVQFGLDQLKESQRLGLRRLITDLAIPFSEIDEETISFKLAPVLNAVGRLEDANQVVELLTSFEEERVASLSQHFIQVNEDRKTLVKESVAEALTSLNPNDHIHIVKADHWHQGVLGIMASRIVNETGKPAIVLKEFKNQGIVKGSARSVENFDLFAACSEVRELFVSFGGHQMAAGMTLETNRLDELRDFLNQRLAQLKEEIDIRPSLAIDGEISPDQVTLATIRELNLLKPFGQDNPKPQFILKNPPIKEVRRIGQDKSHLKLILDDQDRKLEGIGFSLGHLADFLDSKAQCQLVANLDKNVWQNQAKAQLMIQDIRLLSARIIDKRTNQLKKSLFTRTKASYICFNQAIASQVKPYLPSQAQLLTAQEAEAGQSLLEEVYLVDCPQSLGQFKELLPQISDKQVVLYFFKPSSLYFNGLPQPEEFNRVYKYLIGHKSLPLAQAQSRLPNYLQMTSVTFNLVIQVFLEVNFVKIESGRLLFEGSHQKIDLEATSTYQSMQAAMEAEEALLFSPKDQVRSYFDAELNKE

SEQ ID NO: 4557 - DNA, 2322 bp, Alloiococcus otitidis; identical to SEQ ID NO: 4553
  CDS (202)..(2319)

SEQ ID NO: 4558 - protein, 706 aa, Alloiococcus otitidis
MYEIDKAGNRIFKAVEAGEKILIYGDYDADGVTSTAILYECLLTLGGLVTYYIPDRFNDGYGPNADRYQEFIDQGIDLIITVDNGVAGHEAVDLAMSQGIDVIISDHHGLPDQLPDALAVVHPAHPQGDYPFQDLAGAGVALKLSQYLLGEVPQEMLDLAAIGTVADMVSLTGENRTLVQFGLDQLKESQRLGLRRLITDLAIPFSEIDEETISFKLAPVLNAVGRLEDANQVVELLTSFEEERVASLSQHFIQVNEDRKTLVKESVAEALTSLNPNDHIHIVKADHWHQGVLGIMASRIVNETGKPAIVLKEFKNQGIVKGSARSVENFDLFAACSEVRELFVSFGGHQMAAGMTLETNRLDELRDFLNQRLAQLKEEIDIRPSLAIDGEISPDQVTLATIRELNLLKPFGQDNPKPQFILKNPPIKEVRRIGQDKSHLKLILDDQDRKLEGIGFSLGHLADFLDSKAQCQLVANLDKNVWQNQAKAQLMIQDIRLLSARIIDKRTNQLKKSLFTRTKASYICFNQAIASQVKPYLPSQAQLLTAQEAEAGQSLLEEVYLVDCPQSLGQFKELLPQISDKQVVLYFFKPSSLYFNGLPQPEEFNRVYKYLIGHKSLPLAQAQSRLPNYLQMTSVTFNLVIQVFLEVNFVKIESGRLLFEGSHQKIDLEATSTYQSMQAAMEAEEALLFSPKDQVRSYFDAELNKE

SEQ ID NO: 4559 - DNA, 2322 bp, Alloiococcus otitidis; identical to SEQ ID NO: 4553
  CDS (19)..(2319)

SEQ ID NO: 4560 - protein, 767 aa, Alloiococcus otitidis
MSQLNWKLNTEVDKDLVKDLGGDLPYSDLFLELCLSRGLDTVEAIQSFIAKDPSQFHDPSSLYEIDKAGNRIFKAVEAGEKILIYGDYDADGVTSTAILYECLLTLGGLVTYYIPDRFNDGYGPNADRYQEFIDQGIDLIITVDNGVAGHEAVDLAMSQGIDVIISDHHGLPDQLPDALAVVHPAHPQGDYPFQDLAGAGVALKLSQYLLGEVPQEMLDLAAIGTVADMVSLTGENRTLVQFGLDQLKESQRLGLRRLITDLAIPFSEIDEETISFKLAPVLNAVGRLEDANQVVELLTSFEEERVASLSQHFIQVNEDRKTLVKESVAEALTSLNPNDHIHIVKADHWHQGVLGIMASRIVNETGKPAIVLKEFKNQGIVKGSARSVENFDLFAACSEVRELFVSFGGHQMAAGMTLETNRLDELRDFLNQRLAQLKEEIDIRPSLAIDGEISPDQVTLATIRELNLLKPFGQDNPKPQFILKNPPIKEVRRIGQDKSHLKLILDDQDRKLEGIGFSLGHLADFLDSKAQCQLVANLDKNVWQNQAKAQLMIQDIRLLSARIIDKRTNQLKKSLFTRTKASYICFNQAIASQVKPYLPSQAQLLTAQEAEAGQSLLEEVYLVDCPQSLGQFKELLPQISDKQVVLYFFKPSSLYFNGLPQPEEFNRVYKYLIGHKSLPLAQAQSRLPNYLQMTSVTFNLVIQVFLEVNFVKIESGRLLFEGSHQKIDLEATSTYQSMQAAMEAEEALLFSPKDQVRSYFDAELNKE

SEQ ID NO: 4561 - DNA, 414 bp, Alloiococcus otitidis
  CDS (10)..(411)
ggttttggattgtcttggccaaaaggtttgagcaagttaagttcgcgaatggtggccaaggtgacctggtcaggacttatttcaccatcaatggccaggctaggcctgatgtctatttcttctttcagctgggctagcctttggttgaggaagtcccttaattcatctaaacgattggtctctaaggtcattccagcagccatttggtggccaccaaaactgacaaataactctctcacttcactacaagcagcaaagaggtcaaaattttccactgaccgggctgatcctttgacaatgccttggttcttaaattccttaaggactatagcaggcttgccggtttcattaacgatccgactggccataataccaaggacaccctggtgccagtggtcagccttgacgatgtga

SEQ ID NO: 4562 - protein, 134 aa, Alloiococcus otitidis
MSWPKGLSKLSSRMVAKVTWSGLISPSMARLGLMSISSFSWASLWLRKSLNSSKRLVSKVIPAAIWWPPKLTNNSLTSLQAAKRSKFSTDRADPLTMPWFLNSLRTIAGLPVSLTIRLAIIPRTPWCQWSALTM

SEQ ID NO: 4563 - DNA, 840 bp, Alloiococcus otitidis
  CDS (67)..(837)
ctattatcgatgaagccacttggggtgaacaattgtttaccctttttaattagggaggacaagtttatggcaaaaaatgttttaatcacaggtgcttcttcaggcattggccagtcttgtgccttggagagtgtccggcaaggctaccgagtccaccttgtcgcaagacggtgggattatctcaaggctgtccaggttgcctgtgaccaagtgtctccaggttcggcctctatttaccaactggacttagccgatatgaaaaaaacggaccaagtcttaagcgatctcttggctaaagagcaaattgatatcctggtcaattgtgcgggtattggcctagccaagcccttattggagacttcttataaggaaatagtcaagctattccaggtcaatatcctagccttagcttacttgtctaaacgcctagctagccatatgctactcaaggggtcgggccacattgtaaatattgggtctttggcgggaaaagttccgacagcttcgactagtatttattcagctacaaaggctgccgtcatttccctgtccgatgccctacgcttagaattgaaagactatggggtttatgtgacttcagtcaacctagggccggttgatacagacttttttgaaaaagctggcgtctcttcatcttacctggcaaagctttcgtccctcaccttggatccagaccaggtggccaaacgaatagtcaagatctatatgaagcccaaacgtcaggtcaaccttcccattattatgagcctaggtgttaagctacataacctttttcctagcctgtcagaggcatttatccatacatttttcaagaaataa

SEQ ID NO: 4564 - protein, 257 aa, Alloiococcus otitidis
MAKNVLITGASSGIGQSCALESVRQGYRVHLVARRWDYLKAVQVACDQVSPGSASIYQLDLADMKKTDQVLSDLLAKEQIDILVNCAGIGLAKPLLETSYKEIVKLFQVNILALAYLSKRLASHMLLKGSGHIVNIGSLAGKVPTASTSIYSATKAAVISLSDALRLELKDYGVYVTSVNLGPVDTDFFEKAGVSSSYLAKLSSLTLDPDQVAKRIVKIYMKPKRQVNLPIIMSLGVKLHNLFPSLSEAFIHTFFKK

SEQ ID NO: 4565 - DNA, 840 bp, Alloiococcus otitidis; identical to SEQ ID NO: 4563
  CDS (10)..(837)

SEQ ID NO: 4566 - protein, 276 aa, Alloiococcus otitidis
MKPLGVNNCLPFLIREDKFMAKNVLITGASSGIGQSCALESVRQGYRVHLVARRWDYLKAVQVACDQVSPGSASIYQLDLADMKKTDQVLSDLLAKEQIDILVNCAGIGLAKPLLETSYKEIVKLFQVNILALAYLSKRLASHMLLKGSGHIVNIGSLAGKVPTASTSIYSATKAAVISLSDALRLELKDYGVYVTSVNLGPVDTDFFEKAGVSSSYLAKLSSLTLDPDQVAKRIVKIYMKPKRQVNLPIIMSLGVKLHNLFPSLSEAFIHTFFKK

SEQ ID NO: 4567 - DNA, 942 bp, Alloiococcus otitidis
  CDS (13)..(939)
ataggaagttttatggaaatacaatttttaggaactgggtctggcgtcccctcaaagcaccggaatgtttccagcctggccttaaaactcttaaatgaattaaatgaaatttggctttttgactgtggtgaagctacccagcaccaaattttgcggacgaatatcaaaccacgaaaaatttcaaaagtttttatcacccaccttcatggcgaccacatttttggcttgcccggctttctaagctcccgggccttccaaggtggtgcttcacctctgaccttgtatggtcctcctggtattcagtcctttgttcaaacggccttaactgtctctaagacccacctcaaatttcccatcaattatgtcgaattctgtgacggggaccgggtcttatccgacgaccacttccaaataacggtcaagaaggtcaaacatgggattgattcttttggctttcggattgttgaaagggataaaaaggggtccttggacagccaggccctaaaggaagccggagttccatttggtcccctttacggccagttaaaggccggcaaacaggtgaccttagaggacggccggaccattgacggtaaggattatattggccctgacattcctggacgcaaaattaccattattggagacacaagaccttgtactaatagcctagacctggcccaggatgcggacgttttggtccacgaaggaactttcagtcaccaagaaaaagacttggctaaggcttacaaccattcaaccagtgtagaagcagccaggctagccaaagaggcccaggtccaggacttactcctcaaccatatttcggcccgttacctagcttcagacctggaagaatacttaagacaggcccaagaaatctttgcccagacccatatcatgcatgacttttcttcattttctataccggctaagggttaa

SEQ ID NO: 4568 - protein, 309 aa, Alloiococcus otitidis
MEIQFLGTGSGVPSKHRNVSSLALKLLNELNEIWLFDCGEATQHQILRTNIKPRKISKVFITHLHGDHIFGLPGFLSSRAFQGGASPLTLYGPPGIQSFVQTALTVSKTHLKFPINYVEFCDGDRVLSDDHFQITVKKVKHGIDSFGFRIVERDKKGSLDSQALKEAGVPFGPLYGQLKAGKQVTLEDGRTIDGKDYIGPDIPGRKITIIGDTRPCTNSLDLAQDADVLVHEGTFSHQEKDLAKAYNHSTSVEAARLAKEAQVQDLLLNHISARYLASDLEEYLRQAQEIFAQTHIMHDFSSFSIPAKG

SEQ ID NO: 4569 - DNA, 1326 bp, Alloiococcus otitidis
  CDS (25)..(1323)
aagaaaggaggactcaatatgtctatgtttgtcgactacaccaaagttaacctgagagccggtaagggcggtgacggaatggtggcttttagacgagaaaagtatgagcccaatggtggaccagcaggcggcgacggtggcagtggcggtaacattatcttcaaggtagatgaaggcctccgtaccctggtagacttccgctacaacccccattttaaggcagatagtggccaaaatggtatgcccaaggggatgaatggtaagaaggcagaggacttgattatcagtgtcccgcctggaaccattatccgggatgcccaaagtaaggctatacttgctgacttacaagaagaaggacaagaagtcttggcagcccaaggtggccggggaggtcggggcaataaacgttttgctacgcataagaacccagcaccctccattgccgaaaacggcgagccgggccaagagcgggatgtcgaattggaattaaaagtcatggccgatgttggcctagtgggttatccttctgtcgggaaatcgacccttttgtcggttgtctcaggcgctaaacccaaaattggagcctatcactttactacacttgcccctaatttaggtgtagtgaatgcagtggacggcaaggaatttgtcttggcggatattcctggcttaattgaaggggcttcagaaggggttggtttggggattgacttcctcaagcatattgaaagaacccgcatcctccttcatgtacttgatatgagcggaatggaaggtcgccatccaattgatgattttgaccagattaaccaagaactaaaagactataatgagaaattattggaccgcaagcaggtcattgtggccaataaaatggacctgccccagtcccgggataatttaatcgaatttaaagccgagttagacagccgggaccttgactatgaaatctttgaagtgtcagctgccacccaggctggcattcaggacctagtcatccgactagccgacttagtcgaccaactggaccaagccccaagtttagaccaggaagaaactagtgaagccgaccaaagagtggtctacaagtttcaagctgaccaagacaaatttgaccttgaccgcgaccctgaaggggtatggttggtttctggtcccaaggttgagcgtttgtatgccatgaccaattttgaccacgaggaagccattatgcggttttctcgccagctaagagggatgggagtagaccaagccttaagagacaagggggctcagtctggtgacctcgtccaagttgaagattttgtctttgagttcatggattag

SEQ ID NO: 4570 - protein, 433 aa, Alloiococcus otitidis
MFVDYTKVNLRAGKGGDGMVAFRREKYEPNGGPAGGDGGSGGNIIFKVDEGLRTLVDFRYNPHFKADSGQNGMPKGMNGKKAEDLIISVPPGTIIRDAQSKAILADLQEEGQEVLAAQGGRGGRGNKRFATHKNPAPSIAENGEPGQERDVELELKVMADVGLVGYPSVGKSTLLSVVSGAKPKIGAYHFTTLAPNLGVVNAVDGKEFVLADIPGLIEGASEGVGLGIDFLKHIERTRILLHVLDMSGMEGRHPIDDFDQINQELKDYNEKLLDRKQVIVANKMDLPQSRDNLIEFKAELDSRDLDYEIFEVSAATQAGIQDLVIRLADLVDQLDQAPSLDQEETSEADQRVVYKFQADQDKFDLDRDPEGVWLVSGPKVERLYAMTNFDHEEAIMRFSRQLRGMGVDQALRDKGAQSGDLVQVEDFVFEFMD

SEQ ID NO: 4571 - DNA, 1326 bp, Alloiococcus otitidis; identical to SEQ ID NO: 4569
  CDS (19)..(1323)

SEQ ID NO: 4572 - protein, 435 aa, Alloiococcus otitidis
MSMFVDYTKVNLRAGKGGDGMVAFRREKYEPNGGPAGGDGGSGGNIIFKVDEGLRTLVDFRYNPHFKADSGQNGMPKGMNGKKAEDLIISVPPGTIIRDAQSKAILADLQEEGQEVLAAQGGRGGRGNKRFATHKNPAPSIAENGEPGQERDVELELKVMADVGLVGYPSVGKSTLLSVVSGAKPKIGAYHFTTLAPNLGVVNAVDGKEFVLADIPGLIEGASEGVGLGIDFLKHIERTRILLHVLDMSGMEGRHPIDDFDQINQELKDYNEKLLDRKQVIVANKMDLPQSRDNLIEFKAELDSRDLDYEIFEVSAATQAGIQDLVIRLADLVDQLDQAPSLDQEETSEADQRVVYKFQADQDKFDLDRDPEGVWLVSGPKVERLYAMTNFDHEEAIMRFSRQLRGMGVDQALRDKGAQSGDLVQVEDFVFEFMD

SEQ ID NO: 4573 - DNA, 318 bp, Alloiococcus otitidis
  CDS (22)..(315)
cccactaggccaacatcggccatgacttttaattccaattcgacatcccgctcttggcccggctcgccgttttcggcaatggagggtgctgggttcttatgcgtagcaaaacgtttattgccccgacctccccggccaccttgggctgccaagacttcttgtccttcttcttgtaagtcagcaagtatagccttactttgggcatcccggataatggttccaggcgggacactgataatcaagtcctctgccttcttaccattcatccccttgggcataccattttggccactatctgccttaaaatgggggttgtag

SEQ ID NO: 4574 - protein, 98 aa, Alloiococcus otitidis
MTFNSNSTSRSWPGSPFSAMEGAGFLCVAKRLLPRPPRPPWAAKTSCPSSCKSASIALLWASRIMVPGGTLIIKSSAFLPFIPLGIPFWPLSALKWGL

SEQ ID NO: 4575 - DNA, 1014 bp, Alloiococcus otitidis
  CDS (7)..(1011)
ccaactatgaaacttttaatgtatggcatcgatacaacactgttagactcggatgcccaaagctttttcttaaccagctttcaaaaccaagaaggactggtcaaacaaatcaagtctttccaaggtgtcttagaagtctacctgctcaatattagtcaagaatttgagatttacctctttattaatgaaaccagctttagccatggggacttgcttcgctatctgtcccaagagagccagctggacttaaatgacctcatcaacttctcctattccctatataacgaagaggccattaatcatttgtttaagaagagttatgactttagcttgctcttgcctagccattacttccaggacatgatcgagtctagtttatcgaccagacgtttatttcatttgggaccccactttaaaaagctcttccgtagtctctataattttatgtttgaagactctgaagaagccttgagttcttataatatcgtcagccagcttttatttatcatgaagtcttgccagtatatcaatgccaaagagagtgacttggttatcttgggggctaatattgagagcttgtacatttcttaccgcttgaaaaaatacggaataaagtcgattaccctggcggctgctaatgactttgaatttgaccagatgcaagcctacctggctgatttaaatccaggcctttttgaattggacccccattttcatttaaaagtcattaagttggacgaaatgaactaccagtatggggcagcggacattttcgtgaacttattggttggtttttccgacatgcgtcaggccttgttagaaaaaattagacaggtccgcctaaccccaaaagctgtggtttatgcatctttttacgcagaagaaaacacaccatttattgaatataaattgaccctgcccatcatttccaaagaccactatttaagtgaggaaatgcaaaaggccatccgattggcagcagaaagaacctaccaacaattactgggaacttaa

SEQ ID NO: 4576 - protein, 335 aa, Alloiococcus otitidis
MKLLMYGIDTTLLDSDAQSFFLTSFQNQEGLVKQIKSFQGVLEVYLLNISQEFEIYLFINETSFSHGDLLRYLSQESQLDLNDLINFSYSLYNEEAINHLFKKSYDFSLLLPSHYFQDMIESSLSTRRLFHLGPHFKKLFRSLYNFMFEDSEEALSSYNIVSQLLFIMKSCQYINAKESDLVILGANIESLYISYRLKKYGIKSITLAAANDFEFDQMQAYLADLNPGLFELDPHFHLKVIKLDEMNYQYGAADIFVNLLVGFSDMRQALLEKIRQVRLTPKAVVYASFYAEENTPFIEYKLTLPIISKDHYLSEEMQKAIRLAAERTYQQLLGT

SEQ ID NO: 4577 - DNA, 609 bp, Alloiococcus otitidis
  CDS (4)..(606)
tttatggatccaaatcatatccaaaaagcagacatcttaatctcagcggtcagccaagaccaatacccagaccaaggcctcccagaagtggctttggctggtcggtccaatgttggcaagtcatcttttatcaatagtatggtcaaccggaaaaaactggcccatacttccagcaagccgggaaagactcggactcttaacttctaccaggttgaaaatgagctcttgctggtggatgtgccgggatatggctttgctaaggtatccaaggctgagcaaaaccgctgggcagctatgatggaagagtactttgccagccgggaaagtttggtcttggtcatccagttagttgactttcggcataagcctagccaactagacatccaaatgtacgaatacctgagtcattttaacctgcctgttttggtgatagcgaccaaggctgataaggtcaagccttccaaacgagacaagcaaatacaagatatcacccaagccttgaacctttatgatggtgaccagtttatggtctattcggccgaaagcaaggaaggcagggaccaggcttggcaaattattcgggaatttttaagggatgaccaactatga

SEQ ID NO: 4578 - protein, 201 aa, Alloiococcus otitidis
MDPNHIQKADILISAVSQDQYPDQGLPEVALAGRSNVGKSSFINSMVNRKKLAHTSSKPGKTRTLNFYQVENELLLVDVPGYGFAKVSKAEQNRWAAMMEEYFASRESLVLVIQLVDFRHKPSQLDIQMYEYLSHFNLPVLVIATKADKVKPSKRDKQIQDITQALNLYDGDQFMVYSAESKEGRDQAWQIIREFLRDDQL

SEQ ID NO: 4579 - DNA, 1278 bp, Alloiococcus otitidis
  CDS (145)..(1275)
ggtggatcaatggttgaccaaaacaagcagacggaagatatttcttgctccttttgtggtaagtctcaagatgaagttaaacgaatagtagccggacctggtgtttttatctgtaatgagtgtgtagacttgtgccaagaaataatggaagaagagctgcaagcagaagaagattcctataccattgacgaattgccgacaccagctgaaattcgcgatatcctaaatgaatacatcatcggccaagacaacgccaaaagagccctctcggttgcagtttataaccactataaacgcgtcaattacttgcaggaaacaagagatgaagaagatgttgaattacaaaaaagtaatatttgtttgatcgggccaacggggtcagggaagacctaccttgcccagaccttggcaaggatcttaaatgtcccttttgccattgctgatgccactaacttgacagaggcaggctatgtgggggatgatgtggaaaacatcttattaaaactcttgcaatcggcagactatgacgtggaccgggcccaacacggcattatttatgttgatgaaatcgataaaattgcccgaaaatccgaaaatgtctctattactagggacgtcagtggggaaggggttcaacaagctcttttaaaaattttagaagggactacagcttctgttccccctcaaggtgggcggaagcatcctcaacaggaaatgatcgaaattgataccactaatatcctctttatcgttggaggagcctttgacggaattgagtctattgtcaaagaacgcttaggtgagaaattaatcggttttggaacctccaaccgcaagaaagaaattgatgatagccagtccattatgcaagagattatacccgaagacttgctgaagtatggtttgattccagaatttattggtcgcttacccatcacagccgtcttagataaattggatgaggatgacctggttcaaatccttaccaaaccaaaaaattcattggtcaaacaatacgaaaaactcctcgaaatggaccaagttgaccttgagtttgatgaagcttctctcagagtcattggcaagaaggcaatcgaaagagataccggggctcggggattacggtctataattgaagccatcatgttagatgtcatgtatgacgttccaagcctggaccaagttaaaaaggtcgtggttacggaagcagctgccttgggtgaaaccaagcccgattacctggatgcagatggcaagcttgtttctagtgataattag

SEQ ID NO: 4580 - protein, 377 aa, Alloiococcus otitidis
MEEELQAEEDSYTIDELPTPAEIRDILNEYIIGQDNAKRALSVAVYNHYKRVNYLQETRDEEDVELQKSNICLIGPTGSGKTYLAQTLARILNVPFAIADATNLTEAGYVGDDVENILLKLLQSADYDVDRAQHGIIYVDEIDKIARKSENVSITRDVSGEGVQQALLKILEGTTASVPPQGGRKHPQQEMIEIDTTNILFIVGGAFDGIESIVKERLGEKLIGFGTSNRKKEIDDSQSIMQEIIPEDLLKYGLIPEFIGRLPITAVLDKLDEDDLVQILTKPKNSLVKQYEKLLEMDQVDLEFDEASLRVIGKKAIERDTGARGLRSIIEAIMLDVMYDVPSLDQVKKVVVTEAAALGETKPDYLDADGKLVSSDN

SEQ ID NO: 4581 - DNA, 1278 bp, Alloiococcus otitidis; identical to SEQ ID NO: 4579
  CDS (10)..(1275)

SEQ ID NO: 4582 - protein, 422 aa, Alloiococcus otitidis
MVDQNKQTEDISCSFCGKSQDEVKRIVAGPGVFICNECVDLCQEIMEEELQAEEDSYTIDELPTPAEIRDILNEYIIGQDNAKRALSVAVYNHYKRVNYLQETRDEEDVELQKSNICLIGPTGSGKTYLAQTLARILNVPFAIADATNLTEAGYVGDDVENILLKLLQSADYDVDRAQHGIIYVDEIDKIARKSENVSITRDVSGEGVQQALLKILEGTTASVPPQGGRKHPQQEMIEIDTTNILFIVGGAFDGIESIVKERLGEKLIGFGTSNRKKEIDDSQSIMQEIIPEDLLKYGLIPEFIGRLPITAVLDKLDEDDLVQILTKPKNSLVKQYEKLLEMDQVDLEFDEASLRVIGKKAIERDTGARGLRSIIEAIMLDVMYDVPSLDQVKKVVVTEAAALGETKPDYLDADGKLVSSDN

SEQ ID NO: 4583 - DNA, 1338 bp, Alloiococcus otitidis
  CDS (157)..(1335)
atgactacgaagtttgaaaagattggtccaacaactggtaaattatctttcaccattgacaaggataccgttaagagtggcctagaccgtacttttaagaaagtaaaagggaatttaaacgttccaggttttcgtaaagggaagttacctcgaaaaatgttcgataaaatatatggggaagaagccctatatgaagataccttaaatgacattttaccctttgcctaccagcaagctttaaatgaagaaggaatcgaaccagttggccagccacaaattgatgctgaatcaatggaaaaaggtcaagactgggaattggtggctgaagtgacccttaaacctgaagttgaattgggtcaatacaagggcttagaagttgctaaacaagagcgtgacgtttcggatgaagaagtggaagaaagcttgaaacgtcgacaagaacgagcagctgaattaaccattaaagatggcaaagctgaagaaggcgacactgtcgtcattgacttcaaaggctttaaagatggcgaggaatttgaagggggccaagcagacaacttctctcttgaactcggctcaggccaattcattcctggttttgaagaccaattaattggtgtttctccagaagaagaagtaaaagttgaagtaaccttccctgaagactaccaagcagaagacttggctggtcaagaagcggtctttgaagtgaccgttcacgaggttaagtctaaagaattgccagaactcgacgatgaatttgccaaagatgaagacgaagatgtcgaatctatagatgaattacggcaaaaaatccgccaagaattagaagagggcagagctcaagcggctgaagaggctcgtgacgatgaagctatccgtaaagctgttgaaaatgctgacattccagaaatccctcaagctatggcggatgaagaagtgaaccgacaaatggaaatgtacttgggtaatatgcaacaacaagggatttcccctgaaatgtacttcagcatgaccggaaccagtgaggatgacttgcgcgagcaatttgaagatggggctgaatttaatgtcagaaccaatctcgttttgcaagccattgtcgaagctgaaaacattgaagtcaatgaagaggaaatggacgaagaaattgcggacttagccgaacaatacaacatggaagagtctcgtgtccgggatgtcttgtctcctgacttgttgcaaaacgacatttccttgaaaaaagctattgacttgattacctcgactgctaaagaaacagaagaagccactgcaagccaagagtctgaagcagacaaagaagcggaagaggccgaatag

SEQ ID NO: 4584 - protein, 393 aa, Alloiococcus otitidis
MFDKIYGEEALYEDTLNDILPFAYQQALNEEGIEPVGQPQIDAESMEKGQDWELVAEVTLKPEVELGQYKGLEVAKQERDVSDEEVEESLKRRQERAAELTIKDGKAEEGDTVVIDFKGFKDGEEFEGGQADNFSLELGSGQFIPGFEDQLIGVSPEEEVKVEVTFPEDYQAEDLAGQEAVFEVTVHEVKSKELPELDDEFAKDEDEDVESIDELRQKIRQELEEGRAQAAEEARDDEAIRKAVENADIPEIPQAMADEEVNRQMEMYLGNMQQQGISPEMYFSMTGTSEDDLREQFEDGAEFNVRTNLVLQAIVEAENIEVNEEEMDEEIADLAEQYNMEESRVRDVLSPDLLQNDISLKKAIDLITSTAKETEEATASQESEADKEAEEAE

SEQ ID NO: 4585 - DNA, 1338 bp, Alloiococcus otitidis; identical to SEQ ID NO: 4583
  CDS (1)..(1335)

SEQ ID NO: 4586 - protein, 445 aa, Alloiococcus otitidis
MTTKFEKIGPTTGKLSFTIDKDTVKSGLDRTFKKVKGNLNVPGFRKGKLPRKMFDKIYGEEALYEDTLNDILPFAYQQALNEEGIEPVGQPQIDAESMEKGQDWELVAEVTLKPEVELGQYKGLEVAKQERDVSDEEVEESLKRRQERAAELTIKDGKAEEGDTVVIDFKGFKDGEEFEGGQADNFSLELGSGQFIPGFEDQLIGVSPEEEVKVEVTFPEDYQAEDLAGQEAVFEVTVHEVKSKELPELDDEFAKDEDEDVESIDELRQKIRQELEEGRAQAAEEARDDEAIRKAVENADIPEIPQAMADEEVNRQMEMYLGNMQQQGISPEMYFSMTGTSEDDLREQFEDGAEFNVRTNLVLQAIVEAENIEVNEEEMDEEIADLAEQYNMEESRVRDVLSPDLLQNDISLKKAIDLITSTAKETEEATASQESEADKEAEEAE

SEQ ID NO: 4587 - DNA, 513 bp, Alloiococcus otitidis
  CDS (253)..(510)
ttcttctttaatgatgttcaatgtgtcaaaagaggaatgcccggcatccctctttttttccttatccaagttaggtcttcgatgcggtactattcggcctcttccgcttctttgtctgcttcagactcttggcttgcagtggcttcttctgtttctttagcagtcgaggtaatcaagtcaatagcttttttcaaggaaatgtcgttttgcaacaagtcaggagacaagacatcccggacacgagactcttccatgttgtattgttcggctaagtccgcaatttcttcgtccatttcctcttcattgacttcaatgttttcagcttcgacaatggcttgcaaaacgagattggttctgacattaaattcagccccatcttcaaattgctcgcgcaagtcatcctcactggttccggtcatgctgaagtacatttcaggggaaatcccttgttgttgcatattacccaagtacatttccatttgtcggttcacttcttcatccgccatagcttga

SEQ ID NO: 4588 - protein, 86 aa, Alloiococcus otitidis
MLYCSAKSAISSSISSSLTSMFSASTMACKTRLVLTLNSAPSSNCSRKSSSLVPVMLKYISGEIPCCCILPKYISICRFTSSSAIA

SEQ ID NO: 4589 - DNA, 513 bp, Alloiococcus otitidis; identical to SEQ ID NO: 4587
  CDS (37)..(510)

SEQ ID NO: 4590 - protein, 158 aa, Alloiococcus otitidis
MPGIPLFFLIQVRSSMRYYSASSASLSASDSWLAVASSVSLAVEVIKSIAFFKEMSFCNKSGDKTSRTRDSSMLYCSAKSAISSSISSSLTSMFSASTMACKTRLVLTLNSAPSSNCSRKSSSLVPVMLKYISGEIPCCCILPKYISICRFTSSSAIA

SEQ ID NO: 4591 - DNA, 978 bp, Alloiococcus otitidis
  CDS (40)..(975)
ggatcttgccctagtagcttttttaaggagtggctagagatggctgacataattccctttccagatgattatactcggctagtccaggctggcaagcaggctgaaaatagtgggaagttaaaagaagcctaccaagtctatagccaggcctataaggtcaatcccaacctgtccttaaacttgaccatggctaggctgtcctttgacttggaagaccctgaccaggccctttttgttttagaagactatctagatgactatgtcaaagcctatcagttgggtcaggacaaccaggaaggactggccctttatctgagagggctggctgaagaaaaccgatatgaagactttatcgccctagtggacgggcagttggttgattattcctatgaccaaattgaagcagacttaaacttggatctcaaagactttatggctcgctatcagggtcatcttaaaaagcttaaccaagatctttttagcctgggacagtttcccccaagtcagcaaattgacattgcctcggcttattatgcttttgatcgagacgattactttcaagcctgtcaaattgccttgcccaacagatatgtccaccccattaccaaaacagctttaatccaaggactcttggtcaaggactttgaccaaaccatcagctacccctttttaaaggagacctaccaagttgatttgagccagcttgctgggatcaaagaagacgaatttggcaggcagttggagggcctggctgaagacttgtttcaggccgaccccacaaaagttgccctggttaaaaatgaagtttggcttgactaccttatcctctatcccttgcaccggaagctgatcacggatccagtgtcttgggtcttgtcctatcaaggctattttgaccttgaagcaagtgggggagagaagtcagatcaaggccggctttttagccaggttcaaaggctcaagctttctgacagctaa

SEQ ID NO: 4592 - protein, 312 aa, Alloiococcus otitidis
MADIIPFPDDYTRLVQAGKQAENSGKLKEAYQVYSQAYKVNPNLSLNLTMARLSFDLEDPDQALFVLEDYLDDYVKAYQLGQDNQEGLALYLRGLAEENRYEDFIALVDGQLVDYSYDQIEADLNLDLKDFMARYQGHLKKLNQDLFSLGQFPPSQQIDIASAYYAFDRDDYFQACQIALPNRYVHPITKTALIQGLLVKDFDQTISYPFLKETYQVDLSQLAGIKEDEFGRQLEGLAEDLFQADPTKVALVKNEVWLDYLILYPLHRKLITDPVSWVLSYQGYFDLEASGGEKSDQGRLFSQVQRLKLSDS

SEQ ID NO: 4593 - DNA, 441 bp, Alloiococcus otitidis
  CDS (70)..(438)
aaactggaaaaatcacctcacttatgctatcatttacctgttacagttcatttggtgaggagaatctatatggctgacatgaaaattaccgatgaaattcaaaatcttgtcgaaactgaattacggaagggtgcatccaattcccggatcgctaacttgcttgagctcgactataaggaagctgttaaaattattgatactattaaagaaaacctccgtcctgatgtgggggacaaaattatcttttctttccgagacgaacccatggaaggggaaatcgaaaaactcttaaccaacagtgctatcgtcaagatcaattggcgtaattcctcaaaaagcatgttggacttaatggaagaaaaaacggtcgttaactttaaagatattgaaggttttaaataccaagtcagtgaagatgaagacgcagaccaagaggcataa

SEQ ID NO: 4594 - protein, 123 aa, Alloiococcus otitidis
MADMKITDEIQNLVETELRKGASNSRIANLLELDYKEAVKIIDTIKENLRPDVGDKIIFSFRDEPMEGEIEKLLTNSAIVKINWRNSSKSMLDLMEEKTVVNFKDIEGFKYQVSEDEDADQEA

SEQ ID NO: 4595 - DNA, 441 bp, Alloiococcus otitidis; identical to SEQ ID NO: 4593
  CDS (52)..(438)

SEQ ID NO: 4596 - protein, 129 aa, Alloiococcus otitidis
MVRRIYMADMKITDEIQNLVETELRKGASNSRIANLLELDYKEAVKIIDTIKENLRPDVGDKIIFSFRDEPMEGEIEKLLTNSAIVKINWRNSSKSMLDLMEEKTVVNFKDIEGFKYQVSEDEDADQEA

SEQ ID NO: 4597 - DNA, 888 bp, Alloiococcus otitidis
  CDS (19)..(885)
cctaccaaggaccaaggcatgggggggttaagaggagtaattcgccaatttgacctggcttattcgatcgatggagtcaactggcacacattggaagataggattagcttagaagagacttcggcattacaagtcatcgaacttgaccaggcagtccaggctaatttcctagccttaaaggtccttgaaacaagtgacaatgaatttattgccggcagtggcctctatgtttttcaagtcccacatacgaaagccttactagctggagacgtaactggcgacggtagggtggacgacagtgacatccggtcctttaaaaattatgctggtttaagacggggcgacagtgactttgaaggctacattgaagtagctgacttaaaccacaatggctacattgatgcctacgatatttacctggcgagcgggcagattaataaaggatctggccaaaactccggtcaaattcaagacctagcaggtaaactccgattatccagcgacaaggatcaagtttcgtctggtgagacctttaccctttccctaaaagggaaagacttaaaaggcgtccatgccgtaaacggccgccttcccttaagttccaaccaagtcacaccgcttgctagcatggagacgaataccaactttagggatacggaaaacttctctcggattagacaacacaagagtggtgaccaagtggcctacctgatcctagccaattacaaggacagccctggccttcagggaaaccacttccttgctagcttatgtctccaagcccaagcagaccttgacctagacaagcttatagcgagactagatggaactgactttttcctagtgggtaaagacaagaaggttaagcaaggtttgacccgaccttag

SEQ ID NO: 4598 - protein, 289 aa, Alloiococcus otitidis
MGGLRGVIRQFDLAYSIDGVNWHTLEDRISLEETSALQVIELDQAVQANFLALKVLETSDNEFIAGSGLYVFQVPHTKALLAGDVTGDGRVDDSDIRSFKNYAGLRRGDSDFEGYIEVADLNHNGYIDAYDIYLASGQINKGSGQNSGQIQDLAGKLRLSSDKDQVSSGETFTLSLKGKDLKGVHAVNGRLPLSSNQVTPLASMETNTNFRDTENFSRIRQHKSGDQVAYLILANYKDSPGLQGNHFLASLCLQAQADLDLDKLIARLDGTDFFLVGKDKKVKQGLTRP

SEQ ID NO: 4599 - DNA, 3105 bp, Alloiococcus otitidis
  CDS (1066)..(3102)
ttttttagagctactgtagccaaccagacaagtgacagaagaggagcaggtggtcttatcaaagagttgaaccagcaagggaagtctttcgttcccacttacttagcaggtatccaagaactttcaataaagaacaaaacaattgatatcaagtataaaaatgcttaccgaggcagaattcaagtttggactcccactatatttcgtcttcaagtggaaaaagaagggcatgattttaccgaccggccagagccttggcaagcagataagccggcccatattttgataaaggatttcactgatacagaggattttgaagtcaaactaaaagaaagcgatcaagactatcaagtactgacctcagcctataccgcttctttagacaagaaccaggggaccctgaaagtctatcaaaagggggcaagccgaccaattattcaagagcttcacccccttagcttgagcccacaaggaacaagtcaaacattaaaggccaatgaagatacttattattttggtggggggatccaaaatggacgtttttcacataagggtaagcggataaacattgtcaacgaaaataactgggttgacggtggcgttgcctcccctaatccattttattggactacggacggctacggtgtcctccgccatacctttaaacctggttattatgattttgctagtagtgacccaaaccaggtggtcactagccacctggaagaccgctttgatgctttttatatcttgggagagaagccacaagatattttaaagggctactttgacctgacaggggctccaattgttctgccggcttactccctttatgaaggtcacttaaatgcttacaaccgggacttttgggttgaagttgccccagaccatccagacgggatttattttgctgaagtagacaagtggtatagggaagtccacccagaccagttgaaccaagtcaagggtgagggaataattaaggaaagcttgtcggggcagccaaaagataaaaactatccttttaccgcgtctgccttagttaaccgctaccgtcgccatgacatgcccctgggttggatcttagtcaatgacggctatggagcaggttatggccaagaagacagcctggaagggaatatcagaaacttagaagaatttaccaaagagacggaaggcaaggggattgtgacgggtctgtggacggaatctgaactgacaccagatgagagtctgcctgccttattacaaagggatttggtcaaggaggtaaaccaggcctctgtccgtgtgctgaagacggatgttgcctgggtaggtcctggctactcttttggcctccacggaacccaggaagcaggggacatgatggagcgggcctcaggcgggagccggcgttttataatcagtctggacggctgggcagggtctcagcggaatgctgggttttggacgggagaccaaaacggtggggagtgggagtatatccgctttcatattcccacctacattggtactggactttccggtaaccccaacatctgctctgacatggacggtatttttggtggaggcaatcccattatcaacatccgggattaccagtggaagacctttaccgggatgcaactcaacatggacggttggggagcaaacccaaaaggcccctttgtctttgaccagacgacttctgatttaaaccggacctatctcaagctcaagtctcagttaatcccctatgcttacactttgatgcaccaagcccttgagggagacccgatcgtacgggccatgtttattgattttcccaaggaggaagtaaattatagccaggccgttaactaccaatttatgtttggagataactttctagtggcaccggtctacgaggatgttaagatggaccaggaaggcaacgatgtccgcaaccatatctacttacctgagggagagaagtggatcgactactttaccggtcaagtgtatgatggaggctatttcttgcataactttgaagcccctatttggaaattgcccctttttgtccgggcaggagctattatccccatggctaagccaagtaataatatgaaagaatttgacccaagttaccgaatttttgaaatttatccctttggtcaaactagtttttgcttaattgaagatgatggctactccactgactaccaagcaggccaagttgctaaaacagacctaacttgctgggaaaaagaaggccaggtcacggttgaactaggcccttgccagggaagcttccagggccaggtagaaaagaaagttaaccaatttaacctgaatgtgaccgaacgtccaaatgtacttcaactaagcattgatggggtacagcaagacttgcttgaagtgtctagtctagaggactttgaaaaagctagttttgctttctactatgacccttgtccaaacctaaaccattattccagccaagacggggacttttatggggaaaaatggatcaaaaacccggtcctccggattaaaacaggtcctatttccatccggtctaaggtcaaactacaggtaaatggctttgtctatgactatccagcaatagaccaagtagatgaagtaagcggaatcggacctgacctagccttggcagaagatggagtcaagacgaactcccttaccctgacttgggaagatcaagctggggctttacgttatgacttgttggtagacgaccaggtccacctgaatattcaagagccgatttttacccaagcaaacctacaagccgaaacttcctatagcttccgagttcgagctgtttttaaggaccacatgacagactggtccaatcccaaaacgcttacaacggccgaagatgacttttcttggactgtatccgttcaagaaattaaaggtgactttaagggcaaggtcaaccagccacttgtacctttagttgacggcaagcctggaacttactttttagagccattagaccaagaggaccttccgggacagatccaactagacttgggccgggtttacactattgaccgcttagcctaccaaggaccaaggcatgggggggttaagaggagtaattcgccaatttga

SEQ ID NO: 4600 - protein, 679 aa, Alloiococcus otitidis
MPLGWILVNDGYGAGYGQEDSLEGNIRNLEEFTKETEGKGIVTGLWTESELTPDESLPALLQRDLVKEVNQASVRVLKTDVAWVGPGYSFGLHGTQEAGDMMERASGGSRRFIISLDGWAGSQRNAGFWTGDQNGGEWEYIRFHIPTYIGTGLSGNPNICSDMDGIFGGGNPIINIRDYQWKTFTGMQLNMDGWGANPKGPFVFDQTTSDLNRTYLKLKSQLIPYAYTLMHQALEGDPIVRAMFIDFPKEEVNYSQAVNYQFMFGDNFLVAPVYEDVKMDQEGNDVRNHIYLPEGEKWIDYFTGQVYDGGYFLHNFEAPIWKLPLFVRAGAIIPMAKPSNNMKEFDPSYRIFEIYPFGQTSFCLIEDDGYSTDYQAGQVAKTDLTCWEKEGQVTVELGPCQGSFQGQVEKKVNQFNLNVTERPNVLQLSIDGVQQDLLEVSSLEDFEKASFAFYYDPCPNLNHYSSQDGDFYGEKWIKNPVLRIKTGPISIRSKVKLQVNGFVYDYPAIDQVDEVSGIGPDLALAEDGVKTNSLTLTWEDQAGALRYDLLVDDQVHLNIQEPIFTQANLQAETSYSFRVRAVFKDHMTDWSNPKTLTTAEDDFSWTVSVQEIKGDFKGKVNQPLVPLVDGKPGTYFLEPLDQEDLPGQIQLDLGRVYTIDRLAYQGPRHGGVKRSNSPI

SEQ ID NO: 4601 - DNA, 3105 bp, Alloiococcus otitidis; identical to SEQ ID NO: 4599
  CDS (214)..(3102)

SEQ ID NO: 4602 - protein, 963 aa, Alloiococcus otitidis
MEKEGHDFTDRPEPWQADKPAHILIKDFTDTEDFEVKLKESDQDYQVLTSAYTASLDKNQGTLKVYQKGASRPIIQELHPLSLSPQGTSQTLKANEDTYYFGGGIQNGRFSHKGKRINIVNENNWVDGGVASPNPFYWTTDGYGVLRHTFKPGYYDFASSDPNQVVTSHLEDRFDAFYILGEKPQDILKGYFDLTGAPIVLPAYSLYEGHLNAYNRDFWVEVAPDHPDGIYFAEVDKWYREVHPDQLNQVKGEGIIKESLSGQPKDKNYPFTASALVNRYRRHDMPLGWILVNDGYGAGYGQEDSLEGNIRNLEEFTKETEGKGIVTGLWTESELTPDESLPALLQRDLVKEVNQASVRVLKTDVAWVGPGYSFGLHGTQEAGDMMERASGGSRRFIISLDGWAGSQRNAGFWTGDQNGGEWEYIRFHIPTYIGTGLSGNPNICSDMDGIFGGGNPIINIRDYQWKTFTGMQLNMDGWGANPKGPFVFDQTTSDLNRTYLKLKSQLIPYAYTLMHQALEGDPIVRAMFIDFPKEEVNYSQAVNYQFMFGDNFLVAPVYEDVKMDQEGNDVRNHIYLPEGEKWIDYFTGQVYDGGYFLHNFEAPIWKLPLFVRAGAIIPMAKPSNNMKEFDPSYRIFEIYPFGQTSFCLIEDDGYSTDYQAGQVAKTDLTCWEKEGQVTVELGPCQGSFQGQVEKKVNQFNLNVTERPNVLQLSIDGVQQDLLEVSSLEDFEKASFAFYYDPCPNLNHYSSQDGDFYGEKWIKNPVLRIKTGPISIRSKVKLQVNGFVYDYPAIDQVDEVSGIGPDLALAEDGVKTNSLTLTWEDQAGALRYDLLVDDQVHLNIQEPIFTQANLQAETSYSFRVRAVFKDHMTDWSNPKTLTTAEDDFSWTVSVQEIKGDFKGKVNQPLVPLVDGKPGTYFLEPLDQEDLPGQIQLDLGRVYTIDRLAYQGPRHGGVKRSNSPI

SEQ ID NO: 4603 - DNA, 3105 bp, Alloiococcus otitidis; identical to SEQ ID NO: 4599
  CDS (67)..(3102)

SEQ ID NO: 4604 - protein, 1012 aa, Alloiococcus otitidis
MNQQGKSFVPTYLAGIQELSIKNKTIDIKYKNAYRGRIQVWTPTIFRLQVEKEGHDFTDRPEPWQADKPAHILIKDFTDTEDFEVKLKESDQDYQVLTSAYTASLDKNQGTLKVYQKGASRPIIQELHPLSLSPQGTSQTLKANEDTYYFGGGIQNGRFSHKGKRINIVNENNWVDGGVASPNPFYWTTDGYGVLRHTFKPGYYDFASSDPNQVVTSHLEDRFDAFYILGEKPQDILKGYFDLTGAPIVLPAYSLYEGHLNAYNRDFWVEVAPDHPDGIYFAEVDKWYREVHPDQLNQVKGEGIIKESLSGQPKDKNYPFTASALVNRYRRHDMPLGWILVNDGYGAGYGQEDSLEGNIRNLEEFTKETEGKGIVTGLWTESELTPDESLPALLQRDLVKEVNQASVRVLKTDVAWVGPGYSFGLHGTQEAGDMMERASGGSRRFIISLDGWAGSQRNAGFWTGDQNGGEWEYIRFHIPTYIGTGLSGNPNICSDMDGIFGGGNPIINIRDYQWKTFTGMQLNMDGWGANPKGPFVFDQTTSDLNRTYLKLKSQLIPYAYTLMHQALEGDPIVRAMFIDFPKEEVNYSQAVNYQFMFGDNFLVAPVYEDVKMDQEGNDVRNHIYLPEGEKWIDYFTGQVYDGGYFLHNFEAPIWKLPLFVRAGAIIPMAKPSNNMKEFDPSYRIFEIYPFGQTSFCLIEDDGYSTDYQAGQVAKTDLTCWEKEGQVTVELGPCQGSFQGQVEKKVNQFNLNVTERPNVLQLSIDGVQQDLLEVSSLEDFEKASFAFYYDPCPNLNHYSSQDGDFYGEKWIKNPVLRIKTGPISIRSKVKLQVNGFVYDYPAIDQVDEVSGIGPDLALAEDGVKTNSLTLTWEDQAGALRYDLLVDDQVHLNIQEPIFTQANLQAETSYSFRVRAVFKDHMTDWSNPKTLTTAEDDFSWTVSVQEIKGDFKGKVNQPLVPLVDGKPGTYFLEPLDQEDLPGQIQLDLGRVYTIDRLAYQGPRHGGVKRSNSPI

SEQ ID NO: 4605 - DNA, 1026 bp, Alloiococcus otitidis
  CDS (79)..(1023)
aagatcggactgaagagttcggtcttttttcacattatcacaagcggaaagggaagatttttagtgagagctgtcaaaatggccaaggatacggatgatatcagtctggtcgatatagaccaaccggctatccaagcagaccaaattttagtggaggttcaggcttgtggggtcaaccgactcgacttaatccaccgcaagtctaaggccgaccaagtcttgggggtagaagtagctggtcgagtggtggaggctggagaccaggcccagacaaaagtagggagccgggtcatgggcctcggtcaaacaggaggctatgcggactatgccgtcttagatgaccaattggccatgccggtgccagaacatctttcctttgttcaggcggcagctattccggaagtctttttaactgcctaccaatgcctctttaccataggccagttgaaagcagaccagaaagttttaatccatgctggggcttccggtgtggggacggcagccatccaattagctcgtcaagttagtcctagccggatttatgccacagctggctcttccaataaaattcaattctgccaagatcttggggcagacctggctatcaattacaaggaggaagactttgccaagcttgtttcagctgacagccaagaccaaggcgtggacttgatccttgactttgttggagcaaactattggcatcagaatatagcgactttagccactgacggcaagcttgttttgattggccttttaagtggtagccaggttaaagacttggacttggctgaaatccaaagcaagcggctgcaaattgaaggtacccttctatcttcccggtccttagcctataaaagagacttggttgcttcttttaccagccatgccttagatcgttttcagtcaggccgattagaaccaatcattgaccaggttttcccctttgaaaatgttgaagtggcccaccaatatatggcagataataaaaatattggtaaaattattttagacctttcccagtaa

SEQ ID NO: 4606 - protein, 315 aa, Alloiococcus otitidis
MAKDTDDISLVDIDQPAIQADQILVEVQACGVNRLDLIHRKSKADQVLGVEVAGRVVEAGDQAQTKVGSRVMGLGQTGGYADYAVLDDQLAMPVPEHLSFVQAAAIPEVFLTAYQCLFTIGQLKADQKVLIHAGASGVGTAAIQLARQVSPSRIYATAGSSNKIQFCQDLGADLAINYKEEDFAKLVSADSQDQGVDLILDFVGANYWHQNIATLATDGKLVLIGLLSGSQVKDLDLAEIQSKRLQIEGTLLSSRSLAYKRDLVASFTSHALDRFQSGRLEPIIDQVFPFENVEVAHQYMADNKNIGKIILDLSQ

SEQ ID NO: 4607 - DNA, 1026 bp, Alloiococcus otitidis; identical to SEQ ID NO: 4605
  CDS (64)..(1023)

SEQ ID NO: 4608 - protein, 320 aa, Alloiococcus otitidis
MRAVKMAKDTDDISLVDIDQPAIQADQILVEVQACGVNRLDLIHRKSKADQVLGVEVAGRVVEAGDQAQTKVGSRVMGLGQTGGYADYAVLDDQLAMPVPEHLSFVQAAAIPEVFLTAYQCLFTIGQLKADQKVLIHAGASGVGTAAIQLARQVSPSRIYATAGSSNKIQFCQDLGADLAINYKEEDFAKLVSADSQDQGVDLILDFVGANYWHQNIATLATDGKLVLIGLLSGSQVKDLDLAEIQSKRLQIEGTLLSSRSLAYKRDLVASFTSHALDRFQSGRLEPIIDQVFPFENVEVAHQYMADNKNIGKIILDLSQ

SEQ ID NO: 4609 - DNA, 315 bp, Alloiococcus otitidis
  CDS (37)..(312)
tttattttcgttaatttaacaggaggtgtaacaacgatggctaataagtcagagttaatcgataaagttgcacaagcaactgatttaactaaaaaagatgcttcagcagcagtggaagcagtctttgattcaatcactgaaactttgtcaaatgatgaaaaagttcaaattattggcttcggtacttttgaggttcgtgaacgcgctgcacgcaagggacgtaacccacaaacaggtgatgaaatcgaaatacctgcaagtaaagtacctgctttcaaagccggtaaagcattgaaagaatcagttaaaaaataa

SEQ ID NO: 4610 - protein, 92 aa, Alloiococcus otitidis
MANKSELIDKVAQATDLTKKDASAAVEAVFDSITETLSNDEKVQIIGFGTFEVRERAARKGRNPQTGDEIEIPASKVPAFKAGKALKESVKK

SEQ ID NO: 4611 - DNA, 1338 bp, Alloiococcus otitidis
  CDS (25)..(1335)
aagagaaagaaagaaggtgtactgatggctaatcctttagtagccataatcggccggcctaatgtcggcaagtcaactattttcaaccggattattggagaccgcttagccattgtccaggatgaacccggggtcacccgggaccgtatttatgccgatgctgaatggttgggcaaagacttttctgttatagatacgggaggaatcacttttgatgatttgcccttgcatgaagaaataaaagtccaagctgaaattgccattgatgaagcagatgtcatcgtcatggtaaccagtgtcaaagagggcattacagacttggatgaccaggtagccttaattttgcagcagtccaacaaacccgtggtccttgctgttaataaaacagataatcctgagcttagaaatgaaatatatgagttttacgggttaggcttgggtgacccccttccggtatccgggtctcacggcctaggctttggggacctcttagacgcagtggtggccaactttcctaatgaggccaatatggcttatgaccaagataccattaagttctgcttgattggtcgtcccaatgttggcaagtctagcctagttaatgctattattggggaagaccgggttatagtctctgaactagaagggaccacccgggatgcaattgacactccctttatgacccaggatggccaggactatgttatgatcgatactgctgggatccggcgtcggggcaaggtctatgaaaaaactgaaaagtattctgttatgcgggcacagcgagctatcgaccggtctgatgtggtcttgtgtgtcctggatgctgaaacaggcattagagaccaagataagaaggttttcggctatgctcatcaagccggcaagggaattattattttagtcaataagtgggacacgattaaaaaagagactaacaccatgcgagactttgagttgcaaattcgcgaccaattccgctacctccactatgccccaatccttttcgtctcagccaagaccaagcagagactggaagtcatcccggaattggtcgaccgggtctattataaccgcaatcaacgggtcaagtcctccctcttaaatgatgtgctgagtgatgcactagccagcaatcctgcacctagtaagtcagggaagcgactcaaggtcttttatgcgacccaggtagccactaatccacctacttttgtggtttttgtcaatgatcctgacctcatgcacttctcctatgagcgctttttagaaaatcgattccgcgaaagctttgacttctatggcactccgattcagataatccctagagcaaggaaataa

SEQ ID NO: 4612 - protein, 437 aa, Alloiococcus otitidis
MANPLVAIIGRPNVGKSTIFNRIIGDRLAIVQDEPGVTRDRIYADAEWLGKDFSVIDTGGITFDDLPLHEEIKVQAEIAIDEADVIVMVTSVKEGITDLDDQVALILQQSNKPVVLAVNKTDNPELRNEIYEFYGLGLGDPLPVSGSHGLGFGDLLDAVVANFPNEANMAYDQDTIKFCLIGRPNVGKSSLVNAIIGEDRVIVSELEGTTRDAIDTPFMTQDGQDYVMIDTAGIRRRGKVYEKTEKYSVMRAQRAIDRSDVVLCVLDAETGIRDQDKKVFGYAHQAGKGIIILVNKWDTIKKETNTMRDFELQIRDQFRYLHYAPILFVSAKTKQRLEVIPELVDRVYYNRNQRVKSSLLNDVLSDALASNPAPSKSGKRLKVFYATQVATNPPTFVVFVNDPDLMHFSYERFLENRFRESFDFYGTPIQIIPRARK

SEQ ID NO: 4613 - DNA, 1302 bp, Alloiococcus otitidis
  CDS (37)..(1299)
ctgtatgtaaatatcgcattgggaggacaaagtaagatgtcagaagagaataataatttagatcaaaatgcatcaatggatgatgttttaaaagaagttgtcgatgtgaagcctggagaccttgtttctggtgaagtactaacaattgacagcgataaaaacgttgtcgttggtttaggtggcggccaagaaggtattgtgcctttacgtgaaatttctgcttctcgagttgatgatcctagcgaagtggttgaaattggcgacaatattgatgttgtcgtcttgcgtgacgtgaaagataaagaacaagggagcttgatcttatctaaacgaaatgttgaccaacaacgtatctggaacgaattgaaagagaaagcagataatgatgaagtcattgaagcacctgtttctcgcgttgtgaaaggcggggttaccgttgatttaggtgtaagaggtttcgtacctgcttctctcttagatactaaatttgtcaatgatttaagtgaattcgaaggcaacacctatgaattcaaaatcattgaaattgacccgaatgaccaccaattgattctttcccgaaaagcaattttacaagaagaggaagcagaagaacggcgtcaagcactcgaaagcttggaagaaggatcagttgtaacggggactgttgtccgcttaaccaactttggtgccttcgtaaacttgggtggcgttgacggtttggttcacgtttctgaaattgcccatgaacgaatcaaccacccaggggaccggttagaaaaaggtcaagaagttgaagtaaaaatcttaaaagtggatattgagagagaacgggtttccctatccattaaagataccctaccaggcccttgggaagatgctgaaacagaattcccagcaggtagtgttgtcaaagggactgttaaacggatcaccgacttcggggcctttgtggaattgaaacctggtgtagaaggtttagtccacatttctgaactagcccacaagcacgttgaaaccccacatgaagttgtttcaactggtgaagaagtcgaagtgaaggtactggacgttgacgctgaccgtgaacgggtctccctcagtatcaaggccttagaagatgcccctaaaggcggcaaccagtctaataactcaggaaattctggtaaacaaagacgacaaaaagattcatctgtcaacgtgaaacaaccgtctttacgtgacgaagaaaatgaatcaactttctccttaggtgaccaaattggggatcaattgtcagacttctttaatgatgatgacgaataa

SEQ ID NO: 4614 - protein, 421 aa, Alloiococcus otitidis
MSEENNNLDQNASMDDVLKEVVDVKPGDLVSGEVLTIDSDKNVVVGLGGGQEGIVPLREISASRVDDPSEVVEIGDNIDVVVLRDVKDKEQGSLILSKRNVDQQRIWNELKEKADNDEVIEAPVSRVVKGGVTVDLGVRGFVPASLLDTKFVNDLSEFEGNTYEFKIIEIDPNDHQLILSRKAILQEEEAEERRQALESLEEGSVVTGTVVRLTNFGAFVNLGGVDGLVHVSEIAHERINHPGDRLEKGQEVEVKILKVDIERERVSLSIKDTLPGPWEDAETEFPAGSVVKGTVKRITDFGAFVELKPGVEGLVHISELAHKHVETPHEVVSTGEEVEVKVLDVDADRERVSLSIKALEDAPKGGNQSNNSGNSGKQRRQKDSSVNVKQPSLRDEENESTFSLGDQIGDQLSDFFNDDDE

SEQ ID NO: 4615 - DNA, 1302 bp, Alloiococcus otitidis; identical to SEQ ID NO: 4613
  CDS (19)..(1299)

SEQ ID NO: 4616 - protein, 427 aa, Alloiococcus otitidis
MGGQSKMSEENNNLDQNASMDDVLKEVVDVKPGDLVSGEVLTIDSDKNVVVGLGGGQEGIVPLREISASRVDDPSEVVEIGDNIDVVVLRDVKDKEQGSLILSKRNVDQQRIWNELKEKADNDEVIEAPVSRVVKGGVTVDLGVRGFVPASLLDTKFVNDLSEFEGNTYEFKIIEIDPNDHQLILSRKAILQEEEAEERRQALESLEEGSVVTGTVVRLTNFGAFVNLGGVDGLVHVSEIAHERINHPGDRLEKGQEVEVKILKVDIERERVSLSIKDTLPGPWEDAETEFPAGSVVKGTVKRITDFGAFVELKPGVEGLVHISELAHKHVETPHEVVSTGEEVEVKVLDVDADRERVSLSIKALEDAPKGGNQSNNSGNSGKQRRQKDSSVNVKQPSLRDEENESTFSLGDQIGDQLSDFFNDDDE

SEQ ID NO: 4617 - DNA, 459 bp, Alloiococcus otitidis
  CDS (127)..(456)
gtgttgccttcgaattcacttaaatcattgacaaatttagtatctaagagagaagcaggtacgaaacctcttacacctaaatcaacggtaaccccgcctttcacaacgcgagaaacaggtgcttcaatgacttcatcattatctgctttctctttcaattcgttccagatacgttgttggtcaacatttcgtttagataagatcaagctcccttgttctttatctttcacgtcacgcaagacgacaacatcaatattgtcgccaatttcaaccacttcgctaggatcatcaactcgagaagcagaaatttcacgtaaaggcacaataccttcttggccgccacctaaaccaacgacaacgtttttatcgctgtcaattgttagtacttcaccagaaacaaggtctccaggcttcacatcgacaacttcttttaaaacatcatccattgatgcattttga

SEQ ID NO: 4618 - protein, 110 aa, Alloiococcus otitidis
MTSSLSAFSFNSFQIRCWSTFRLDKIKLPCSLSFTSRKTTTSILSPISTTSLGSSTREAEISRKGTIPSWPPPKPTTTFLSLSIVSTSPETRSPGFTSTTSFKTSSIDAF

SEQ ID NO: 4619 - DNA, 459 bp, Alloiococcus otitidis; identical to SEQ ID NO: 4617
  CDS (4)..(456)

SEQ ID NO: 4620 - protein, 151 aa, Alloiococcus otitidis
MPSNSLKSLTNLVSKREAGTKPLTPKSTVTPPFTTRETGASMTSSLSAFSFNSFQIRCWSTFRLDKIKLPCSLSFTSRKTTTSILSPISTTSLGSSTREAEISRKGTIPSWPPPKPTTTFLSLSIVSTSPETRSPGFTSTTSFKTSSIDAF

SEQ ID NO: 4621 - DNA, 459 bp, Alloiococcus otitidis; identical to SEQ ID NO: 4617
  CDS (1)..(456)

SEQ ID NO: 4622 - protein, 152 aa, Alloiococcus otitidis
MLPSNSLKSLTNLVSKREAGTKPLTPKSTVTPPFTTRETGASMTSSLSAFSFNSFQIRCWSTFRLDKIKLPCSLSFTSRKTTTSILSPISTTSLGSSTREAEISRKGTIPSWPPPKPTTTFLSLSIVSTSPETRSPGFTSTTSFKTSSIDAF

SEQ ID NO: 4623 - DNA, 678 bp, Alloiococcus otitidis
  CDS (1)..(675)
atgtctaggagagagtttttgaaaaacaagttagcccttgcaattgatggcccagcctcatcaggtaagagtacggtggccaagttaattgcagacgagaaaaactttatctacattgacacgggggccatgtaccgggccttgacctaccatgccctagaccagggagtggatatccatgatggcccatccttattggacttactcgaccaaagcaagatttcttttgcaaagaaaaatggagaccaattgacctacctgaacggacaagatgtgtctttggctatccgacaaaatgatgtcacccaggccgtttctcaggtctctagtcataaagaggttcggcaagaaatggtccggcgtcagcaagagttggctagtcagggtagtgtggtcatggacggacgggatattggcacagtcgttctgccagatgctgaagtcaagatttttttggaagctagtccggaagagcgggcgagacgtcgttaccaagaaaaccaaagcaaaggcatcagtagcacttaccaggacttgcttgaagagataaagaaacgggaccaactagactcgactagggaagtctctcctttgaagcaagcccaagatgccgtggttattgataccacatccttgactattgaagaagttaaagataaaatattacaacaattttaa

SEQ ID NO: 4624 - protein, 225 aa, Alloiococcus otitidis
MSRREFLKNKLALAIDGPASSGKSTVAKLIADEKNFIYIDTGAMYRALTYHALDQGVDIHDGPSLLDLLDQSKISFAKKNGDQLTYLNGQDVSLAIRQNDVTQAVSQVSSHKEVRQEMVRRQQELASQGSVVMDGRDIGTVVLPDAEVKIFLEASPEERARRRYQENQSKGISSTYQDLLEEIKKRDQLDSTREVSPLKQAQDAVVIDTTSLTIEEVKDKILQQF

SEQ ID NO: 4625 - DNA, 729 bp, Alloiococcus otitidis
  CDS (61)..(726)
tccaatgtattatcagtaaataatatgttaaaattaatcttaaggacgaggagggaagttatgtctgacgagcaaaataatgagcatgaaaataaacaaaagcaagaaaaagatgaagagttatggtcaaaaaaatttgacgaagaattaaatgaccaaaataaggagaaggaatcccgaactagccaaagagggaactcgagtgtctctcctattttaacagtaactgttgttctgcttggtttattgattgcaattatcgtcttctcctacatatttacccgagggagaggcccattagatcctaatgatcctaaccaagaagtggcccagacccaggtggaagaagatgatgatcaagaagatcaagaaggtgaagaagaccaggaggaccaggaagacgaggctgaagaggatccggaagaaaaccaagaagatcaagaagaaccggagcctgagccggaacccgaaccagaaccggaaccggagcctgagcctgaaccggaacccgaacctgaacaagagcctgagccggaagccgaaccagaaacagagcctgagtcggagcccgagcctgaagaagactataacacctatgtggttcagccccaagacaatctctatcggattgctgttaaccatgggatgactttggatgagttactggagttaaatggtctatcagtgaattcatcgattcatgccggagacgaactgttagtttattaa

SEQ ID NO: 4626 - protein, 222 aa, Alloiococcus otitidis
MSDEQNNEHENKQKQEKDEELWSKKFDEELNDQNKEKESRTSQRGNSSVSPILTVTVVLLGLLIAIIVFSYIFTRGRGPLDPNDPNQEVAQTQVEEDDDQEDQEGEEDQEDQEDEAEEDPEENQEDQEEPEPEPEPEPEPEPEPEPEPEPEPEQEPEPEAEPETEPESEPEPEEDYNTYVVQPQDNLYRIAVNHGMTLDELLELNGLSVNSSIHAGDELLVY

SEQ ID NO: 4627 - DNA, 729 bp, Alloiococcus otitidis; identical to SEQ ID NO: 4625
  CDS (25)..(726)

SEQ ID NO: 4628 - protein, 234 aa, Alloiococcus otitidis
MLKLILRTRREVMSDEQNNEHENKQKQEKDEELWSKKFDEELNDQNKEKESRTSQRGNSSVSPILTVTVVLLGLLIAIIVFSYIFTRGRGPLDPNDPNQEVAQTQVEEDDDQEDQEGEEDQEDQEDEAEEDPEENQEDQEEPEPEPEPEPEPEPEPEPEPEPEPEQEPEPEAEPETEPESEPEPEEDYNTYVVQPQDNLYRIAVNHGMTLDELLELNGLSVNSSIHAGDELLVY

SEQ ID NO: 4629 - DNA, 1599 bp, Alloiococcus otitidis
  CDS (670)..(1596)
attcccccaagtagagctgacctatttagttccggaccaaattcgtcgggaactcttagacttttttgcccaaaatccaaccccgcgatatgcccaagccaaagaccaacttggcgaattagaattttaccactaccgtttgatagaactggagttgatccggcaatgaccatggatttacaagctgtattaaaggaacactttgccttcgatttctttaggccaggccaaaaagaaagtattgaatcagccctcaaaggccaagacaccttagttatactgccaacagggtctggtaagtctgtttgctatcaattatttccatatctgctaagaggaacgactttaatcatttctcctttaatttccttaatgcaagaccaggttgataaaatccgcttaagaggggagaagagggtttgtgcccttaattcaagcttgaccaaaatggagcgggcttacatccggtctaacataaaagcctataagtttatttacctgtctccagaaatgctagcccaatcctatgtcttggacttattgcaacaaatccatattaatttactagtcgtggatgaagcccactgtgtcagccaatgggggatggattttagaccagactacttgcagattgcgagttttcggaaatccttggacaagccaactctaatggctctgacggcaactgctagaccggctgtccaggaccaaattatgtcgcttttggactttgaccctgaccaaagccaggtaatcaaggcaaaaattgaccgccctgagataaaatattcttttgaagaggtagaagacaaggaccagcgcttatttgaattagtcaagaacttgaaaaagcctggtctagtctatttttctagtaaaaaacaggctgaccgaattgcccaagctctagttcaaaggggctttcgtgctgaaagttaccatgcagacaagtccgactatgataaaagagtgattcaaaaccaatttttagcccagcagatccaagttgtctgtgcgacctcggcttttggtatggggattgacaagaaagatattcgcttcgttatccactatcatatgccaggggatccggaagtctatctccaagaaactggccgttgcagccgggacggtcgggctggtctggccctctgcctttatcaaagaggagatgaaaaactccaagctaagttgaagttaaaatcgattccccaagcacaaacgatccaatttgtttttcgcaagcctcagcaagtcaaagataaggatgataaccagtataagttaattaaatacttttacgaccaaggatggtcgctggaagataccctcgcatttttttaccaacgtaagcaatatattttaaaccaagtccaatttatgcggagtttagttgacagtgaccgatgcattcgccaatctctgttggcttatttcggggaccagtctcctcatcatgaagaattttgctgcagtgtttgccagccgggtattgaaaaacaattctatggccaagaaggtcaggaagaggatagtttagagatcaagcctgtcgataaaattttaaggtctttatataatccaatgtattatcagtaa

SEQ ID NO: 4630 - protein, 309 aa, Alloiococcus otitidis
MALTATARPAVQDQIMSLLDFDPDQSQVIKAKIDRPEIKYSFEEVEDKDQRLFELVKNLKKPGLVYFSSKKQADRIAQALVQRGFRAESYHADKSDYDKRVIQNQFLAQQIQVVCATSAFGMGIDKKDIRFVIHYHMPGDPEVYLQETGRCSRDGRAGLALCLYQRGDEKLQAKLKLKSIPQAQTIQFVFRKPQQVKDKDDNQYKLIKYFYDQGWSLEDTLAFFYQRKQYILNQVQFMRSLVDSDRCIRQSLLAYFGDQSPHHEEFCCSVCQPGIEKQFYGQEGQEEDSLEIKPVDKILRSLYNPMYYQ

SEQ ID NO: 4631 - DNA, 1599 bp, Alloiococcus otitidis; identical to SEQ ID NO: 4629
  CDS (166)..(1596)

SEQ ID NO: 4632 - protein, 477 aa, Alloiococcus otitidis
MTMDLQAVLKEHFAFDFFRPGQKESIESALKGQDTLVILPTGSGKSVCYQLFPYLLRGTTLIISPLISLMQDQVDKIRLRGEKRVCALNSSLTKMERAYIRSNIKAYKFIYLSPEMLAQSYVLDLLQQIHINLLVVDEAHCVSQWGMDFRPDYLQIASFRKSLDKPTLMALTATARPAVQDQIMSLLDFDPDQSQVIKAKIDRPEIKYSFEEVEDKDQRLFELVKNLKKPGLVYFSSKKQADRIAQALVQRGFRAESYHADKSDYDKRVIQNQFLAQQIQVVCATSAFGMGIDKKDIRFVIHYHMPGDPEVYLQETGRCSRDGRAGLALCLYQRGDEKLQAKLKLKSIPQAQTIQFVFRKPQQVKDKDDNQYKLIKYFYDQGWSLEDTLAFFYQRKQYILNQVQFMRSLVDSDRCIRQSLLAYFGDQSPHHEEFCCSVCQPGIEKQFYGQEGQEEDSLEIKPVDKILRSLYNPMYYQ

SEQ ID NO: 4633 - DNA, 561 bp, Alloiococcus otitidis
  CDS (301)..(558)
agcaagctggatgaaagagcaaggactcttgctgagccaagtccaagaccaagcggcacgaatcttagcgaatacttaaccgggcacgaccttttcgggcttacccttgaccagcttgcaagatttttgtcttgggaaaaaggggaaatctattgggtctttcaccaagcctgtgcctactatctgtccttacttgaccaggaaggccagtcttttccactccaccgcaagcttttaaattacaccaaccaagtccaaacttacggcttgacccagtccgcctaccaaacttttcgcttaatggttaaaaggaagtctttggatcaaatcgcccaaatcaagggagtcaagcttggtaccattaaggagcactaccttgagattgcctttaaattcccccaagtagagctgacctatttagttccggaccaaattcgtcgggaactcttagacttttttgcccaaaatccaaccccgcgatatgcccaagccaaagaccaacttggcgaattagaattttaccactaccgtttgatagaactggagttgatccggcaatga

SEQ ID NO: 4634 - protein, 86 aa, Alloiococcus otitidis
MVKRKSLDQIAQIKGVKLGTIKEHYLEIAFKFPQVELTYLVPDQIRRELLDFFAQNPTPRYAQAKDQLGELEFYHYRLIELELIRQ

SEQ ID NO: 4635 - DNA, 561 bp, Alloiococcus otitidis; identical to SEQ ID NO: 4633
  CDS (127)..(558)

SEQ ID NO: 4636 - protein, 144 aa, Alloiococcus otitidis
MSWEKGEIYWVFHQACAYYLSLLDQEGQSFPLHRKLLNYTNQVQTYGLTQSAYQTFRLMVKRKSLDQIAQIKGVKLGTIKEHYLEIAFKFPQVELTYLVPDQIRRELLDFFAQNPTPRYAQAKDQLGELEFYHYRLIELELIRQ

SEQ ID NO: 4637 - DNA, 576 bp, Alloiococcus otitidis
  CDS (19)..(573)
agggaagggggcaaaaaaatggataactacctgatgcatatcttgctgtccatgtatcaaaaaccagccaataccggtcaaatttataatgtgaccattggccggtcgacaccgaccatcttgtacctgactgaggtcaatggttggaaggtatactacggaaccctgcctgggttaaaacgaaatcaagtggaggcttgccaaaagatttttttgaagcagggctggctcaagcccacgcctcatgaggataaatttatcgtctcaaaacaaggccaaacccagcttgaccagtattttgctgaccacagctcgctaagagaccaaggcacttttttaacttttcctttctaccactatttttggcaaatggtccagtttatgacccaagtcgtgtctgaaaaaagttatgccaacaagcactacctgcccttgaaaagtgatttgaaaagtcaaatctttgtcaaatcagtcaagtctagtgtacaagactttgaagcaagctggatgaaagagcaaggactcttgctgagccaagtccaagaccaagcggcacgaatcttagcgaatacttaa

SEQ ID NO: 4638 - protein, 185 aa, Alloiococcus otitidis
MDNYLMHILLSMYQKPANTGQIYNVTIGRSTPTILYLTEVNGWKVYYGTLPGLKRNQVEACQKIFLKQGWLKPTPHEDKFIVSKQGQTQLDQYFADHSSLRDQGTFLTFPFYHYFWQMVQFMTQVVSEKSYANKHYLPLKSDLKSQIFVKSVKSSVQDFEASWMKEQGLLLSQVQDQAARILANT

SEQ ID NO: 4639 - DNA, 675 bp, Alloiococcus otitidis
  CDS (331)..(672)
atcctattgttacttgccaaaagtacaaaatataggaggatttttatggaaaataccaagacaaaacgtctagtaggggttgcagcaatggctgcgattgcatttattatctcccgctttgacttccctatctttcccacagtaccttttttgaaaattgatttttcggacatacctatcttcttcggcatgtatgtctttggacctgttgctggtgtctttattgcctttatccggtccttgttgggctacgtggttactgggggcgaagcaggctttcctgtaggggctatcgcttcctttgttgcttcagtttctctcaccctacctttgtattactttacggtcaataaaaaattgaatttaaaaacaaaactattagccggtctcgtggcttctcttgttctggccttcatgttgaccctgtctaattacttctttgtactccctgcctacttaaccgttatgggctttgacattaccgaactcactgggtcagtggctaattatatcatctacttcttagttcctttcaacttgatcaagggtgccttggtctctagcctagtctatattgtttatgaacgcatggctacttggctgaataagcagagaaaacgctactttaatgaccctatagaccaacaacccggtgcttctgtctcaaattcctag

SEQ ID NO: 4640 - protein, 114 aa, Alloiococcus otitidis
MYYFTVNKKLNLKTKLLAGLVASLVLAFMLTLSNYFFVLPAYLTVMGFDITELTGSVANYIIYFLVPFNLIKGALVSSLVYIVYERMATWLNKQRKRYFNDPIDQQPGASVSNS

SEQ ID NO: 4641 - DNA, 675 bp, Alloiococcus otitidis; identical to SEQ ID NO: 4639
  CDS (46)..(672)

SEQ ID NO: 4642 - protein, 209 aa, Alloiococcus otitidis
MENTKTKRLVGVAAMAAIAFIISRFDFPIFPTVPFLKIDFSDIPIFFGMYVFGPVAGVFIAFIRSLLGYVVTGGEAGFPVGAIASFVASVSLTLPLYYFTVNKKLNLKTKLLAGLVASLVLAFMLTLSNYFFVLPAYLTVMGFDITELTGSVANYIIYFLVPFNLIKGALVSSLVYIVYERMATWLNKQRKRYFNDPIDQQPGASVSNS

SEQ ID NO: 4643 - DNA, 675 bp, Alloiococcus otitidis; identical to SEQ ID NO: 4639
  CDS (7)..(672)

SEQ ID NO: 4644 - protein, 222 aa, Alloiococcus otitidis
MLLAKSTKYRRIFMENTKTKRLVGVAAMAAIAFIISRFDFPIFPTVPFLKIDFSDIPIFFGMYVFGPVAGVFIAFIRSLLGYVVTGGEAGFPVGAIASFVASVSLTLPLYYFTVNKKLNLKTKLLAGLVASLVLAFMLTLSNYFFVLPAYLTVMGFDITELTGSVANYIIYFLVPFNLIKGALVSSLVYIVYERMATWLNKQRKRYFNDPIDQQPGASVSNS

SEQ ID NO: 4645 - DNA, 765 bp, Alloiococcus otitidis
  CDS (67)..(762)
atttgtttgattttaaccagaaccgaaaagaagaggagtgagaatgtggaccgattgcagaaggtaatggctcatgccggagtggcttcccgaagaaagtcagaagacattatcaagcaaggccgggtgacggttaacggccaagtggtgacggacatgggagtccaggtgaaaaaagacgacctggttaaggtggacggcattccactagaaagagaagtcctcgtttatgtcttgatgaacaaacccaaagggactgtttcgactgtggatgaccccaaaggccggccaactgtggtggacttactccaagacctaaaccagcgaatctacccggtcggtcgcttggattatgatacaacaggtgccttgcttttaaccaatgatggggacttagccaataagttgatgcacccccgctatgaattcgaaaaaacttaccgggccaaggtcaaggggctcatcaaccagtcaagcctggcccagttggaacaaggcctggttattgatggggaaaaaacagccccagccaaggctaagttgattgaatacgaccaggccagtgacaagtccatggttgaattgaggctccatgaaggtaaaaaccaccaagtcaaaaaaatgcttgaccaagttggtcacccggtagtcaagttgacccggttagcttatggttttttgcgggttgatgacttggacggaggccagtggcgggaattaaaaaatgctgaagtcagaaagctttaccaagcagtcggcaaataa

SEQ ID NO: 4646 - protein, 232 aa, Alloiococcus otitidis
MAHAGVASRRKSEDIIKQGRVTVNGQVVTDMGVQVKKDDLVKVDGIPLEREVLVYVLMNKPKGTVSTVDDPKGRPTVVDLLQDLNQRIYPVGRLDYDTTGALLLTNDGDLANKLMHPRYEFEKTYRAKVKGLINQSSLAQLEQGLVIDGEKTAPAKAKLIEYDQASDKSMVELRLHEGKNHQVKKMLDQVGHPVVKLTRLAYGFLRVDDLDGGQWRELKNAEVRKLYQAVGK

SEQ ID NO: 4647 - DNA, 765 bp, Alloiococcus otitidis; identical to SEQ ID NO: 4645
  CDS (46)..(762)

SEQ ID NO: 4648 - protein, 239 aa, Alloiococcus otitidis
MDRLQKVMAHAGVASRRKSEDIIKQGRVTVNGQVVTDMGVQVKKDDLVKVDGIPLEREVLVYVLMNKPKGTVSTVDDPKGRPTVVDLLQDLNQRIYPVGRLDYDTTGALLLTNDGDLANKLMHPRYEFEKTYRAKVKGLINQSSLAQLEQGLVIDGEKTAPAKAKLIEYDQASDKSMVELRLHEGKNHQVKKMLDQVGHPVVKLTRLAYGFLRVDDLDGGQWRELKNAEVRKLYQAVGK

SEQ ID NO: 4649 - DNA, 765 bp, Alloiococcus otitidis; identical to SEQ ID NO: 4645
  CDS (7)..(762)

SEQ ID NO: 4650 - protein, 252 aa, Alloiococcus otitidis
MILTRTEKKRSENVDRLQKVMAHAGVASRRKSEDIIKQGRVTVNGQVVTDMGVQVKKDDLVKVDGIPLEREVLVYVLMNKPKGTVSTVDDPKGRPTVVDLLQDLNQRIYPVGRLDYDTTGALLLTNDGDLANKLMHPRYEFEKTYRAKVKGLINQSSLAQLEQGLVIDGEKTAPAKAKLIEYDQASDKSMVELRLHEGKNHQVKKMLDQVGHPVVKLTRLAYGFLRVDDLDGGQWRELKNAEVRKLYQAVGK

SEQ ID NO: 4651 - DNA, 567 bp, Alloiococcus otitidis
  CDS (1)..(564)
atgacggacttaggagaaatagaggccttgctttttgtggccggggaagaaggcatgtctagccaagatttggcccgagcctgtaaaagtaccagccctcatatccaaacctgtttgaaccaattagccgaatcctaccaagcgaatagggaccggggcatcaccctggttaaaactggccccaattaccggctagtggctaaaaacaactacaagcagctaattaaagattatgcccagtcacctggctatcaaaaactcagccggtctatggtggagaccttggctatcatcgcttacaagcaacccattacccggatgggggttgaagaaatcagaggtgtcagtgcttctagtgtcttacaaaaattaaaagcccggtctctgatcaaggaaatgggacacctagaggcaccgggcaaacctcttttatatgggacaacagctgagtttttggactattttgccctagagaaattagaggacttgccccccctagatgatattcccttaaataaagaactagatttgtttgattttaaccagaaccgaaaagaagaggagtga

SEQ ID NO: 4652 - protein, 188 aa, Alloiococcus otitidis
MTDLGEIEALLFVAGEEGMSSQDLARACKSTSPHIQTCLNQLAESYQANRDRGITLVKTGPNYRLVAKNNYKQLIKDYAQSPGYQKLSRSMVETLAIIAYKQPITRMGVEEIRGVSASSVLQKLKARSLIKEMGHLEAPGKPLLYGTTAEFLDYFALEKLEDLPPLDDIPLNKELDLFDFNQNRKEEE

SEQ ID NO: 4653 - DNA, 810 bp, Alloiococcus otitidis
  CDS (13)..(807)
ggagtaagtgatatgaaagggtcccaatttccacaagcagaagacaaccaagctagtcaaccgaagcaaaactggcaggtcaatttggctgtgtttgaaggacccttggacttgcttttgcacttaattcaagatttggaaattgatatttatgatattcccatagcccagattacccagcaatatttaagctatatccattcttccaatgtgatggttttagaccagggcggggattatttggtcatggcagcgactcttatggccattaaaagccagatgcttctaccaagaaatgaccaggttcaggctaactctgcagaagaggatgaccagggccaggatccaagaaactacttaatggccctgctcatccaataccgccgtttcactgaaatttccaagtatctctccggtcgagaagaccagcgcttgacttatatttctaagcccaaggaagacctgtctgacctagaaagtgacccaactttaaaaccaggccaggtttcagtcagtgacctgcaagcggcctttaaccgcgtcttgaatgattatgcactaagacaaccccaggcaagccaggtcaaggctagtcgagtttccgtttcggataagatggaagagatggtggctgacttccgagaccatcctggaccagtcagttttaaccgcttgtttgaccaccagtcccggtatgaattggtgaccgccttcttagccctcctcgaattgaccaagttgaaccgagttaagcttagtcaagatcacttagatgatgagattataattaactggaatggggaggattag

SEQ ID NO: 4654 - protein, 265 aa, Alloiococcus otitidis
MKGSQFPQAEDNQASQPKQNWQVNLAVFEGPLDLLLHLIQDLEIDIYDIPIAQITQQYLSYIHSSNVMVLDQGGDYLVMAATLMAIKSQMLLPRNDQVQANSAEEDDQGQDPRNYLMALLIQYRRFTEISKYLSGREDQRLTYISKPKEDLSDLESDPTLKPGQVSVSDLQAAFNRVLNDYALRQPQASQVKASRVSVSDKMEEMVADFRDHPGPVSFNRLFDHQSRYELVTAFLALLELTKLNRVKLSQDHLDDEIIINWNGED

SEQ ID NO: 4655 - DNA, 459 bp, Alloiococcus otitidis
  CDS (79)..(456)
atttgtttagcaaaagattgtttaaaaaggagtaacaagatgttaactgcatttaaatcggattacgaaaagatagcaatgggtttgttatcttatattgatgatttaaaagtaacctcccgtcttaaagaggagatggacctctattttaatgaggataaccgtcagctttttttgtggaaaagtgacgaaacggatgacttttgtggggtcattggaattgaagaaaacgatgatttgatcttggttcgccatattgctgtcaatccctcttaccggaatgagggaattgcctaccaaatgattgacgcagtggcggaaaaatatgacgtgcaaaccatgatgagcactttggagaccagtgatttggtgaccaagtggcaaaagaaaaagaacgctgagtctgatgcagagtctgaaggagaggctggcttggatcaagaaaagttagacgactaa

SEQ ID NO: 4656 - protein, 126 aa, Alloiococcus otitidis
MGLLSYIDDLKVTSRLKEEMDLYFNEDNRQLFLWKSDETDDFCGVIGIEENDDLILVRHIAVNPSYRNEGIAYQMIDAVAEKYDVQTMMSTLETSDLVTKWQKKKNAESDAESEGEAGLDQEKLDD

SEQ ID NO: 4657 - DNA, 459 bp, Alloiococcus otitidis; identical to SEQ ID NO: 4655
  CDS (40)..(456)

SEQ ID NO: 4658 - protein, 139 aa, Alloiococcus otitidis
MLTAFKSDYEKIAMGLLSYIDDLKVTSRLKEEMDLYFNEDNRQLFLWKSDETDDFCGVIGIEENDDLILVRHIAVNPSYRNEGIAYQMIDAVAEKYDVQTMMSTLETSDLVTKWQKKKNAESDAESEGEAGLDQEKLDD

SEQ ID NO: 4659 - DNA, 342 bp, Alloiococcus otitidis
  CDS (7)..(339)
cttttcttgatccaagccagcctctccttcagactctgcatcagactcagcgttctttttcttttgccacttggtcaccaaatcactggtctccaaagtgctcatcatggtttgcacgtcatatttttccgccactgcgtcaatcatttggtaggcaattccctcattccggtaagagggattgacagcaatatggcgaaccaagatcaaatcatcgttttcttcaattccaatgaccccacaaaagtcatccgtttcgtcacttttccacaaaaaaagctgacggttatcctcattaaaatagaggtccatctcctctttaagacgggaggttacttttaa

SEQ ID NO: 4660 - protein, 111 aa, Alloiococcus otitidis
MIQASLSFRLCIRLSVLFLLPLGHQITGLQSAHHGLHVIFFRHCVNHLVGNSLIPVRGIDSNMANQDQIIVFFNSNDPTKVIRFVTFPQKKLTVILIKIEVHLLFKTGGYF

SEQ ID NO: 4661 - DNA, 831 bp, Alloiococcus otitidis
  CDS (16)..(828)
attaagggggaagttatgacactaatagatgacattaaccaagcccaagcctatttaagggaccagggaatgggccaggctgaaattggcctggtattaggatcaggtctaggagacttagctgaccaggtagacaaccgcctggctattccctaccgagatattccccacttcccaacttctaccgtatcaggccaccaagggctcttgatttttggtgacttggcgggcaaaaaagtcttggccatgcaaggacggtttcactactatgaaggctacaccatgaaagaagtgacttttcccataagggtcatgaaggcactaggagttcacagtctcttagtcaccaatgctgctggcggggtaaaccctaactttaagcctggagacttgatgttgatcaaggaccagctgaatctgaccggagacaaccccttgataggtttcaaccatgaccaacttggtcctcgttttccagatatgagtcaaagttatgaccaagattaccaagaacttattttgggccaagcagaaaagttgggcatttctctacaagaaggggtctatgccggtttgtcaggaccgacttatgaaacaccagctgaagtcaaaatggtgggtattttaggcggggatgccgtggggatgtcaacggtggctgaagccattgttgctaaacacagtcaaatgaaattagctggcctatcttgtatcaccaacttagctgctggcttacaggagagcttgagccatgaagaagtgattgagactacccaggcagtcaaagacaagtttaaatccttggtcttagcctttttggagactatttaa

SEQ ID NO: 4662 - protein, 271 aa, Alloiococcus otitidis
MTLIDDINQAQAYLRDQGMGQAEIGLVLGSGLGDLADQVDNRLAIPYRDIPHFPTSTVSGHQGLLIFGDLAGKKVLAMQGRFHYYEGYTMKEVTFPIRVMKALGVHSLLVTNAAGGVNPNFKPGDLMLIKDQLNLTGDNPLIGFNHDQLGPRFPDMSQSYDQDYQELILGQAEKLGISLQEGVYAGLSGPTYETPAEVKMVGILGGDAVGMSTVAEAIVAKHSQMKLAGLSCITNLAAGLQESLSHEEVIETTQAVKDKFKSLVLAFLETI

SEQ ID NO: 4663 - DNA, 1188 bp, Alloiococcus otitidis
  CDS (19)..(1185)
aaaggagaagggaagaccatgaaatttaaccgtatccacttactcgtcttggactcagttgggattggccaagctccagatgctcaagattttggcgatgaaggcagtcataccttaggtcatatcgctgaccaggtgggcttaaccatccccaacctagaaaaactaggcttgggtaagattgaagacttaaaaggagttgccaagccggaccaaagccaggcttactataccaaactggaagaagtatcagccggcaaggatactatgactggccactgggaaattgctggtttgaatatccagactccttttcgagtttttccggatggttttcccgatgacttaatccaaaagatccaagaccacaccgggcgagacgtagtggccaataagccggcctctggaactgaaattattgaagaatggggtcagcaccagctggatacgggggacttgattatctatacttcagctgacccagtcttgcagattgcagcccacgaggaggttattccccttgaagaattgtatgatatctgcgaatatgtgagaagtataaccaaagaagagccttatatgattggccggatcattgcccgcccctacattgggacccctggcaactttgagcggaccagtaaccgccatgactatgccttgagcccctttggcaaaactgttctcaactatttagaagaagcgggttatgaggtgaaggcagttggtaagatttgggatatctttaatgggtcagggataactgatgcggttcggacccagtcaaatgatgatgggatcaccaagctactagaagtgatggaccaggacttcaccggccttagctttaccaatctggtggattttgatgccaagtttggtcacagaagagatgttcaaggctacggccaggctattgaagcctttgaccaacgtttgccagaattgctggacaagttaagagaagatgacttactcttaattacagctgaccacggcaatgaccctactgcttcagggaccgaccacaccagagaatacgtcccccttttagcttattccaagtcctttaaggagccaggtcaacttagtcaaggctacttttctgatattgccgccacaattgctgctaactttgaccttgaccaggttgaaaacggcaagagtttcttgaactcattaaattaa

SEQ ID NO: 4664 - protein, 389 aa, Alloiococcus otitidis
MKFNRIHLLVLDSVGIGQAPDAQDFGDEGSHTLGHIADQVGLTIPNLEKLGLGKIEDLKGVAKPDQSQAYYTKLEEVSAGKDTMTGHWEIAGLNIQTPFRVFPDGFPDDLIQKIQDHTGRDVVANKPASGTEIIEEWGQHQLDTGDLIIYTSADPVLQIAAHEEVIPLEELYDICEYVRSITKEEPYMIGRIIARPYIGTPGNFERTSNRHDYALSPFGKTVLNYLEEAGYEVKAVGKIWDIFNGSGITDAVRTQSNDDGITKLLEVMDQDFTGLSFTNLVDFDAKFGHRRDVQGYGQAIEAFDQRLPELLDKLREDDLLLITADHGNDPTASGTDHTREYVPLLAYSKSFKEPGQLSQGYFSDIAATIAANFDLDQVENGKSFLNSLN

SEQ ID NO: 4665 - DNA, 930 bp, Alloiococcus otitidis
  CDS (229)..(927)
attagagtagggacaagtgtggaaacaggaattttacaagactacctttattttttacgggttgagcgtggcctgtccgaaaactccatcaagagttatgaaagggacattcggcaatttatcgcttttttgcaagataagaacctagttagctttaatcagacagaccgctataccatcttgtcttttttgcaggaccagcgacaaaaaggcaagtctaacaattccatggtccggatggtgtcttctttacgtaaatttttccagttcctcaagcaagaatcttatattgaccaggaccccatgaccctcattgactcgcccaagaaaggcaaggtcctcccccaggtgatcagccaggaggaagtagagcggttaattgaagtgagtgacactaagacggtactgggcttgagagaccgggccatcttagaggtcttgtatgcgacaggcttgaggatttctgaactgatacacttgaaactaacggacctccacctgaccatgtccttgatccaaaccaagggaaaaggggacaaggaacggattgttcccatttctgacacggccatttattggttgcaagactatttagaaaatagccgggaaagacttttggcaaaatcaagccaagcgaccaatatcgtctttcttaacgcccggggacggcccttgagccggcaaggtttatggaagaaaatcaagcaactggtcaaccaggcgggcattaaagcccaagtgaccccccataccctccgccattcctttgccacccacttactggagaacggggctgatttgcgaattgttcaagagctactgggccattcggatatttcgaccactcaaatttatacccatattaccaagcaaaggctccaggatgtctacaatgcctaccatcctcgggctaaaaagaataaagagtga

SEQ ID NO: 4666 - protein, 233 aa, Alloiococcus otitidis
MVRMVSSLRKFFQFLKQESYIDQDPMTLIDSPKKGKVLPQVISQEEVERLIEVSDTKTVLGLRDRAILEVLYATGLRISELIHLKLTDLHLTMSLIQTKGKGDKERIVPISDTAIYWLQDYLENSRERLLAKSSQATNIVFLNARGRPLSRQGLWKKIKQLVNQAGIKAQVTPHTLRHSFATHLLENGADLRIVQELLGHSDISTTQIYTHITKQRLQDVYNAYHPRAKKNKE

SEQ ID NO: 4667 - DNA, 930 bp, Alloiococcus otitidis; identical to SEQ ID NO: 4665
  CDS (130)..(927)

SEQ ID NO: 4668 - protein, 266 aa, Alloiococcus otitidis
MQDKNLVSFNQTDRYTILSFLQDQRQKGKSNNSMVRMVSSLRKFFQFLKQESYIDQDPMTLIDSPKKGKVLPQVISQEEVERLIEVSDTKTVLGLRDRAILEVLYATGLRISELIHLKLTDLHLTMSLIQTKGKGDKERIVPISDTAIYWLQDYLENSRERLLAKSSQATNIVFLNARGRPLSRQGLWKKIKQLVNQAGIKAQVTPHTLRHSFATHLLENGADLRIVQELLGHSDISTTQIYTHITKQRLQDVYNAYHPRAKKNKE

SEQ ID NO: 4669 - DNA, 930 bp, Alloiococcus otitidis; identical to SEQ ID NO: 4665
  CDS (19)..(927)

SEQ ID NO: 4670 - protein, 303 aa, Alloiococcus otitidis
METGILQDYLYFLRVERGLSENSIKSYERDIRQFIAFLQDKNLVSFNQTDRYTILSFLQDQRQKGKSNNSMVRMVSSLRKFFQFLKQESYIDQDPMTLIDSPKKGKVLPQVISQEEVERLIEVSDTKTVLGLRDRAILEVLYATGLRISELIHLKLTDLHLTMSLIQTKGKGDKERIVPISDTAIYWLQDYLENSRERLLAKSSQATNIVFLNARGRPLSRQGLWKKIKQLVNQAGIKAQVTPHTLRHSFATHLLENGADLRIVQELLGHSDISTTQIYTHITKQRLQDVYNAYHPRAKKNKE

SEQ ID NO: 4671 - DNA, 480 bp, Alloiococcus otitidis
  CDS (16)..(477)
agtgaggggctaggcatgagtcaaacattattagatcaaatcaaagataccctgtctgaggctggttacaagttaacgcctcagagggaagttacggttcaagtgatgattgaccaggaaaatgaacgattgagtgctgaagagatttacctaaaggttaaaaataataacgtgggcattggcctggccaccgtttaccggaccttggaaattttgacagatttgaatattctaaataaggtcaccttccaagatggtctggcccggtatgacctcaataagcaccccaaccagcataaaccccactatctcttgtgcctatcctgtggaaagattgaagaggtagccagtgaccatttgaaaggggtcgaggaagaaattgaaagccagtaccattttaaaattaaagaccatcgactgattttccacggcatctgccaggaatgccaaatgaaagaatcgcaagatgaattagagtag

SEQ ID NO: 4672 - protein, 154 aa, Alloiococcus otitidis
MSQTLLDQIKDTLSEAGYKLTPQREVTVQVMIDQENERLSAEEIYLKVKNNNVGIGLATVYRTLEILTDLNILNKVTFQDGLARYDLNKHPNQHKPHYLLCLSCGKIEEVASDHLKGVEEEIESQYHFKIKDHRLIFHGICQECQMKESQDELE

SEQ ID NO: 4673 - DNA, 903 bp, Alloiococcus otitidis
  CDS (43)..(900)
ttcactagggtcacccttttttcttttaggaggactgaactgatgaaagatcttggtaaaattgtaaaagccctcattgtagaccaggttgagggagtctatttggcccaaaaggagggggagacctacgaggtcaaaagcgataaacctctccaactaggccaaacggtagatgcctttgcctaccttaaccaggacaagcaaaaggtgatgacggtggatttacctattgtgagcttggatgattatggttgggcccgggtggttgaccgcaagcggggcttgggcgtttttgtcgatattggcctagaagacaaggatattgccatttccttggatgacttgcctgaagaagtcaagtattggcccaaaaaagatgaccaggtctatattaacttgtggaccgataaaaaagatcggctgtggggcaaactggctagtcctgacttgtttaagaccatcaccaacaaggggacggccagtttgcacaataatgatgtgacaggtcgggttttggacttgaaagctgcgggtgattatcttatcactggcgatcattacctggcctacctgccccaaactgaaaaagaagaagaaaccaggctaggccaagaagttaaaggccggattattggcttaagagaagatggggtcttgtacttgtcgacgaaaccgagggctcatgaagtgattgatgaagatgcccagatgatttatgcagccatcttaagaagccccaaccaggcaattccctaccacgacaagagcgatccccaggctattcgggattattttgggatcagtaaggggcaattcaagcgggcggtgggccacttgatgaaggataatttagtggcccaagaccaggaaaagacctacttgcttcataataaaaataaataa

SEQ ID NO: 4674 - protein, 286 aa, Alloiococcus otitidis
MKDLGKIVKALIVDQVEGVYLAQKEGETYEVKSDKPLQLGQTVDAFAYLNQDKQKVMTVDLPIVSLDDYGWARVVDRKRGLGVFVDIGLEDKDIAISLDDLPEEVKYWPKKDDQVYINLWTDKKDRLWGKLASPDLFKTITNKGTASLHNNDVTGRVLDLKAAGDYLITGDHYLAYLPQTEKEEETRLGQEVKGRIIGLREDGVLYLSTKPRAHEVIDEDAQMIYAAILRSPNQAIPYHDKSDPQAIRDYFGISKGQFKRAVGHLMKDNLVAQDQEKTYLLHNKNK

SEQ ID NO: 4675 - DNA, 1833 bp, Alloiococcus otitidis
  CDS (76)..(1830)
caacttagccctttaccaattaaaccaggaaatttctttctaaatttaaaccaaaaaaggattgtgagtgaattgatgaaaaaaaccaagatcgtttgtaccataggtcctgccagtgaatctcctcaggttctcgaccaattagttgctgaaggcatgaatgttgctcgcttgaatttttcccatggggaccatgaggagcacctagcacgaattaaaaatatccggcaggctgcccaaaaagccaaaaagcacattgggattatgctggataccaagggacctgaaattcggacccatgatatgaaagacggtttggtgaatattaataagggggaccaaatccggatagccatggaggaggtggaagggaccaaggaaaaattttccatcacctatccaaacctcatccaggatgtccacgtgggttcgagtatcttactggatgacggcttgatcaacctacaagtgactgacattgaccaagacaagcaagaaattgttaccaaggccctcaatagtggaaatttaaaaaataaaaagggcgtcaatgtgccgggagtttccgttaacttgcctgggattaccgaaaaagaccggaaagatattatctttggtttggaaaacgggatagactttattgctgcatcctttgtccgccgtccttctgatgtgttagaaatcactgaattgctagaggaatacgatgctatgcatgtgcagattattccaaaaattgaaaaccaagaaggggtcgacaacctggaagaaattgtcaatgtatcagatggtttgatggttgcccggggggacttgggagttgaaattccagctgaggaagtcccaattgtccaaaaacaaatgatcaaacacttaaactcggttgggaaaccggtcataacagctacccaaatgttagactccatgcaggttaaccccagacctacccgggctgaggcttctgacgtggctaatgctatttttgatggaacggatgccattatgctctcaggcgagacagctgcaggagactaccctgtggatgctgtccgtaccatggctaatattgcggtccggaccgaaacagccttggttggtcaagatgcttattcactcaaacaattcgacaagtcagacttgtccgaagccattgggcaagcagttggccacactgctaagaacttgaagattaaaaccattgtggcagcgactgaatccggccacactgcccggatgatttccaaattccggccccaagccattattttagccgcaactttctcagaccaaacagccaaaagcctttccctcaaatggggggttgttccaacagttgtcgacaagcccaagtctacggatgacatgttcaacttagcgacccaaaaatcggttgagggtggctttgtagaagaaggcgacttgatcttaatcacagccggcgtcccagttggggaaagagggacaactaatgtcatgaaaattcaaatggttggctccaagctagtagaaggccaaggggttggcaacaagtctattgtcggcaaggcttatgtagcaaattcagctgaccaagccaatgtcaagatggtcaaaggtggtgtcttggttgccaaaaccaccgacaaggactacttgagtgccattgagcgagcttctgccatcgtaatcgagcagggtggcttgacctcccatgccgcagttgtcggtattgccatggggattccggttgtggtctcagctaaaaatgccactaaattaatcaatgatgaggaagtcatcacagttgacggccggcggggaattgtttaccgcggggcaacgtcagcgatttaa

SEQ ID NO: 4676 - protein, 585 aa, Alloiococcus otitidis
MKKTKIVCTIGPASESPQVLDQLVAEGMNVARLNFSHGDHEEHLARIKNIRQAAQKAKKHIGIMLDTKGPEIRTHDMKDGLVNINKGDQIRIAMEEVEGTKEKFSITYPNLIQDVHVGSSILLDDGLINLQVTDIDQDKQEIVTKALNSGNLKNKKGVNVPGVSVNLPGITEKDRKDIIFGLENGIDFIAASFVRRPSDVLEITELLEEYDAMHVQIIPKIENQEGVDNLEEIVNVSDGLMVARGDLGVEIPAEEVPIVQKQMIKHLNSVGKPVITATQMLDSMQVNPRPTRAEASDVANAIFDGTDAIMLSGETAAGDYPVDAVRTMANIAVRTETALVGQDAYSLKQFDKSDLSEAIGQAVGHTAKNLKIKTIVAATESGHTARMISKFRPQAIILAATFSDQTAKSLSLKWGVVPTVVDKPKSTDDMFNLATQKSVEGGFVEEGDLILITAGVPVGERGTTNVMKIQMVGSKLVEGQGVGNKSIVGKAYVANSADQANVKMVKGGVLVAKTTDKDYLSAIERASAIVIEQGGLTSHAAVVGIAMGIPVVVSAKNATKLINDEEVITVDGRRGIVYRGATSAI

SEQ ID NO: 4677 - DNA, 1833 bp, Alloiococcus otitidis; identical to SEQ ID NO: 4675
  CDS (73)..(1830)

SEQ ID NO: 4678 - protein, 586 aa, Alloiococcus otitidis
MMKKTKIVCTIGPASESPQVLDQLVAEGMNVARLNFSHGDHEEHLARIKNIRQAAQKAKKHIGIMLDTKGPEIRTHDMKDGLVNINKGDQIRIAMEEVEGTKEKFSITYPNLIQDVHVGSSILLDDGLINLQVTDIDQDKQEIVTKALNSGNLKNKKGVNVPGVSVNLPGITEKDRKDIIFGLENGIDFIAASFVRRPSDVLEITELLEEYDAMHVQIIPKIENQEGVDNLEEIVNVSDGLMVARGDLGVEIPAEEVPIVQKQMIKHLNSVGKPVITATQMLDSMQVNPRPTRAEASDVANAIFDGTDAIMLSGETAAGDYPVDAVRTMANIAVRTETALVGQDAYSLKQFDKSDLSEAIGQAVGHTAKNLKIKTIVAATESGHTARMISKFRPQAIILAATFSDQTAKSLSLKWGVVPTVVDKPKSTDDMFNLATQKSVEGGFVEEGDLILITAGVPVGERGTTNVMKIQMVGSKLVEGQGVGNKSIVGKAYVANSADQANVKMVKGGVLVAKTTDKDYLSAIERASAIVIEQGGLTSHAAVVGIAMGIPVVVSAKNATKLINDEEVITVDGRRGIVYRGATSAI

SEQ ID NO: 4679 - DNA, 1833 bp, Alloiococcus otitidis; identical to SEQ ID NO: 4675
  CDS (64)..(1830)

SEQ ID NO: 4680 - protein, 589 aa, Alloiococcus otitidis
MSELMKKTKIVCTIGPASESPQVLDQLVAEGMNVARLNFSHGDHEEHLARIKNIRQAAQKAKKHIGIMLDTKGPEIRTHDMKDGLVNINKGDQIRIAMEEVEGTKEKFSITYPNLIQDVHVGSSILLDDGLINLQVTDIDQDKQEIVTKALNSGNLKNKKGVNVPGVSVNLPGITEKDRKDIIFGLENGIDFIAASFVRRPSDVLEITELLEEYDAMHVQIIPKIENQEGVDNLEEIVNVSDGLMVARGDLGVEIPAEEVPIVQKQMIKHLNSVGKPVITATQMLDSMQVNPRPTRAEASDVANAIFDGTDAIMLSGETAAGDYPVDAVRTMANIAVRTETALVGQDAYSLKQFDKSDLSEAIGQAVGHTAKNLKIKTIVAATESGHTARMISKFRPQAIILAATFSDQTAKSLSLKWGVVPTVVDKPKSTDDMFNLATQKSVEGGFVEEGDLILITAGVPVGERGTTNVMKIQMVGSKLVEGQGVGNKSIVGKAYVANSADQANVKMVKGGVLVAKTTDKDYLSAIERASAIVIEQGGLTSHAAVVGIAMGIPVVVSAKNATKLINDEEVITVDGRRGIVYRGATSAI

SEQ ID NO: 4681 - DNA, 636 bp, Alloiococcus otitidis
  CDS (253)..(633)
tctcctgcagctgtctcgcctgagagcataatggcatccgttccatcaaaaatagcattagccacgtcagaagcctcagcccgggtaggtctggggttaacctgcatggagtctaacatttgggtagctgttatgaccggtttcccaaccgagtttaagtgtttgatcatttgtttttggacaattgggacttcctcagctggaatttcaactcccaagtccccccgggcaaccatcaaaccatctgatacattgacaatttcttccaggttgtcgaccccttcttggttttcaatttttggaataatctgcacatgcatagcatcgtattcctctagcaattcagtgatttctaacacatcagaaggacggcggacaaaggatgcagcaataaagtctatcccgttttccaaaccaaagataatatctttccggtctttttcggtaatcccaggcaagttaacggaaactcccggcacattgacgccctttttattttttaaatttccactattgagggccttggtaacaatttcttgcttgtcttggtcaatgtcagtcacttgtaggttgatcaagccgtcatccagtaagatactcgaacccacgtggacatcctggatgaggtttggatag

SEQ ID NO: 4682 - protein, 127 aa, Alloiococcus otitidis
MTISSRLSTPSWFSIFGIICTCIASYSSSNSVISNTSEGRRTKDAAIKSIPFSKPKIISFRSFSVIPGKLTETPGTLTPFLFFKFPLLRALVTISCLSWSMSVTCRLIKPSSSKILEPTWTSWMRFG

SEQ ID NO: 4683 - DNA, 636 bp, Alloiococcus otitidis; identical to SEQ ID NO: 4681
  CDS (31)..(633)

SEQ ID NO: 4684 - protein, 201 aa, Alloiococcus otitidis
MASVPSKIALATSEASARVGLGLTCMESNIWVAVMTGFPTEFKCLIICFWTIGTSSAGISTPKSPRATIKPSDTLTISSRLSTPSWFSIFGIICTCIASYSSSNSVISNTSEGRRTKDAAIKSIPFSKPKIISFRSFSVIPGKLTETPGTLTPFLFFKFPLLRALVTISCLSWSMSVTCRLIKPSSSKILEPTWTSWMRFG

SEQ ID NO: 4685 - DNA, 969 bp, Alloiococcus otitidis
  CDS (7)..(966)
ttaaccatgaaaaggattgccgttttaacgagtggtggtgacgcaccaggcatgaactctgccatacgtgctgtggtccgtaaagccctctatgaaggcattgaagtctatggcattaactatggctatgctggacttgtggcaggagactttaaaaaattaacccggcaagatgtcggcgatattatccaaaagggtggaactagcttgtattcagcccgctaccctcaatttgccacagaagaaggccaactcaaagggattgaggaactgaaaaaatttggcattgaaggcctggtagccatcgggggggatggaacataccgcggagcccatgctctaacccagcatggttatccttgtgtttgtattcctggaaccattgacaacgatattgccggaaccgactatacagtcggttttgatacggccatcaacaccgttttagattccttggacaagatccgggatacggctacctcccatgtccggacctttgtcattgaagtcatgggccgggatgcaggtgacattgccctttggaccgggattgccagtggggctgagcaaattattatcccagaagttgattttgacatcactaaaattgctgaaaagatccgtcaagggcgggaacacggcaaaaaacacaccattattgtcttagctgaaggtgttatggggggcaatgaatttgccgaaaaacttgatgccatcgacaacttccacgtccgggtaacggtcttgggccacgtccaaagaggcggttcgccaagtgccagggaccgggtcttggctagtcgttttggagcagcagcggttgacttgttgaaagaagacaagggtggtttggcccttgggataaaaaatgaggccattgtatccaacccgattgaagatgttttagacaagttggaaacaactagcaacttagccctttaccaattaaaccaggaaatttctttctaa

SEQ ID NO: 4686 - protein, 320 aa, Alloiococcus otitidis
MKRIAVLTSGGDAPGMNSAIRAVVRKALYEGIEVYGINYGYAGLVAGDFKKLTRQDVGDIIQKGGTSLYSARYPQFATEEGQLKGIEELKKFGIEGLVAIGGDGTYRGAHALTQHGYPCVCIPGTIDNDIAGTDYTVGFDTAINTVLDSLDKIRDTATSHVRTFVIEVMGRDAGDIALWTGIASGAEQIIIPEVDFDITKIAEKIRQGREHGKKHTIIVLAEGVMGGNEFAEKLDAIDNFHVRVTVLGHVQRGGSPSARDRVLASRFGAAAVDLLKEDKGGLALGIKNEAIVSNPIEDVLDKLETTSNLALYQLNQEISF

SEQ ID NO: 4687 - DNA, 315 bp, Alloiococcus otitidis
  CDS (10)..(312)
agggctaagttgctagttgtttccaacttgtctaaaacatcttcaatcgggttggatacaatggcctcattttttatcccaagggccaaaccacccttgtcttctttcaacaagtcaaccgctgctgctccaaaacgactagccaagacccggtccctggcacttggcgaaccgcctctttggacgtggcccaagaccgttacccggacgtggaagttgtcgatggcatcaagtttttcggcaaattcattgccccccataacaccttcagctaagacaataatggtgtgttttttgccgtgttcccgcccttga

SEQ ID NO: 4688 - protein, 101 aa, Alloiococcus otitidis
MLVVSNLSKTSSIGLDTMASFFIPRAKPPLSSFNKSTAAAPKRLAKTRSLALGEPPLWTWPKTVTRTWKLSMASSFSANSLPPITPSAKTIMVCFLPCSRP

SEQ ID NO: 4689 - DNA, 3324 bp, Alloiococcus otitidis
  CDS (118)..(3321)
aataaaagattgaaacaaatatgtcttagacgaagaggtgacaagatgacttttacccacttacaagtgaccagtgcttacaccttgatggcttcgaccatccaattgcccctcctgatggaccgcctgaaggagcttggcatggaggctgttgccttgaccgaccacaatgttatgcatggagcggtcgaattttaccaagaagccaaaaagcatggcattaaacccattatgggactacgggctgacctagacgaaggaataaccgtcaccctcctggctaaaaacaaggctggctaccaggctctcttagccttatcgactgaccttcaagttaacaagcaggctattacacttgaccaagtccgttctgtggcccaggacctctatacaatattcccaagctctgacccaaaagtgaaagcagacctcttagataagcaggcaagcaatttgaccgcgatgactcagaacctgccccattcatatttgggtctggtgccagaccaagatcaaaaaatttaccagttagcccggaccttgtcagattctggaggtttgaaagtcttagccttatctgacgtccgttgcttggaagaaagccaagtctccactttggaaatcttaagccacatcaaagccaaccagaaaattcaatttgacacccaggctcgggaaaattatgccctgcgcagtccccaagaaatggagtctttttttaaccaggtgggtttaggtcaggcccttaaaaatactaaagatgtagcccagtcagtagactggtccctggacctcggtcaggctaaattgcctgcatttgacctgccggaaggggagaccaaggactcctaccttggcaagcttgcccaaaaaggactccaagaacgggttccaggctacggccaagactaccaagaccgtctagacaaggaactagcggttatttcttccatgggcttttcggactacttcctgattgtttgggacctgatgcaatttgcccgccaggaaaaaattgagactggttttggccgggggtcagctgccgcttctttggtatcttatgccctctacattacgggggtagatcccatccattatgacctcctctttgaacgttttttgaacaaggaccgctttaccatgcctgatattgacctagacttcccagacaacaagcgccaggtcatcttggactatgtctaccggaagtatggtcctgaccatgtggcccaaattttgacctttgggacctttgcggctaagtcctccatcagggaaattatgcggaccttgggttacaagaatgaagacatgaagacctggtcccaggccataccagataccgtcaacatcagcttgtcaaaggcctatgacgagtcgaaagaccttcaaaaactggtccagcaaagccatgaaaatgagcggatctttgccatggcccaggatatcgaaggcctgccaaggaactattcaacccatgcggccggtgtcgtcatgtcagaccagcccctaatccattcccttcccctacaagatggcaacggaaaggtccccaacacccaatttaccatggaggatgttgaagcggtcggcttactcaagatggactttttgagtttaaaaaatttaaccatcctagcagactgcttgaactttagccagtatgaagggcagggagggggtataagtaaacaagatataccaatcgacgaccctaagaccctggatctttttgcccggggagacacaaatggggtcttccaatttgaaaaagagggaatcaaaaaagtcctccgccagcttcaacccacttcttttgaagatatcgtcgccaccaacgccctctaccgccccggtcccatggggcaaattgagaattatattaaccgtaaacatggtcaagaaaaaattatctacccccatgaagacttaaaggacatccttgaagtcacttatggcattattgtctaccaggaacaagtcatgcaggtagctacccaactagctggctatagtttgtcggaagctgaccaattgcggcggactatgtccaaaaaaatccagtcagaaatggaccagggacgggaaaaatttataagaggagccttggacaagggctacagtgagtcagtagcccgagaggtttataactatattgcaaagtttgctaactacggctttaaccgtgcccatgctgttgcctactccatgcttgcctaccatatggcctactttaaggtccaccagcctaaatctttttttgcggctgtgatgaaggcagactggggtaacaaggctaaaatttacaagtatgcccatgaagtccgggctagaaaaattaaactactaaaaccagacatcaaccaaagccttggatcttttacggttcggcagaatggcattcaagtggggcttaagatggtcaagggggtggctagcccctttgtcaaccacatccttgaaattcggaaagaaaagggagcttttaccagcctgcgtgacttttgtgaaaaaattgacagccaattcttaagtcaagaccccattgaagcattgattttggtgggggcctttgaccaaatgggccctaatcggcggaccatgttagcgggcttggaagcaacgattgaattcgtggccaaaagttcgggcaatatcaccctttttgacactctcaagccccgccaagaagacctggaagagtttagcccaaaggacctcattcaatatgaagaagaattaaccggtttttacttctccagccaccccttgagccggtatgactccctgcgacaggacttaaaaacgtcctttatagctgatttagaagagggccaatcttgccaagttttaggtcagctggttcaagtccggaaaactcagactagaaaccaacaacccatggcctttgttagcctggctgaccaaacaggacaaattagcctggtggtctttccgaatgtataccgcgaatgcctaccttacctcaaagaaggagtggtcctggtcgtctcaggcaaggtagaagttaggaagggagaaatccagctaaaagtccagaccatgaaagaggccagccaggtccaaaaagagactaagcagctttacctgaaatttgctgacttgaaccaagataaagaaagttttcgtcaagtgcaaaagatcttggcccgacatcccggccagaagcgagtgattgtttacgaccaggccagccagcaagcactccagctcaaagcaaaatttaatttcgacggacggacggataccctaaaccagctccaggacctcctaggccaggattcttgtatcttaaaataa

SEQ ID NO: 4690 - protein, 1068 aa, Alloiococcus otitidis
MDRLKELGMEAVALTDHNVMHGAVEFYQEAKKHGIKPIMGLRADLDEGITVTLLAKNKAGYQALLALSTDLQVNKQAITLDQVRSVAQDLYTIFPSSDPKVKADLLDKQASNLTAMTQNLPHSYLGLVPDQDQKIYQLARTLSDSGGLKVLALSDVRCLEESQVSTLEILSHIKANQKIQFDTQARENYALRSPQEMESFFNQVGLGQALKNTKDVAQSVDWSLDLGQAKLPAFDLPEGETKDSYLGKLAQKGLQERVPGYGQDYQDRLDKELAVISSMGFSDYFLIVWDLMQFARQEKIETGFGRGSAAASLVSYALYITGVDPIHYDLLFERFLNKDRFTMPDIDLDFPDNKRQVILDYVYRKYGPDHVAQILTFGTFAAKSSIREIMRTLGYKNEDMKTWSQAIPDTVNISLSKAYDESKDLQKLVQQSHENERIFAMAQDIEGLPRNYSTHAAGVVMSDQPLIHSLPLQDGNGKVPNTQFTMEDVEAVGLLKMDFLSLKNLTILADCLNFSQYEGQGGGISKQDIPIDDPKTLDLFARGDTNGVFQFEKEGIKKVLRQLQPTSFEDIVATNALYRPGPMGQIENYINRKHGQEKIIYPHEDLKDILEVTYGIIVYQEQVMQVATQLAGYSLSEADQLRRTMSKKIQSEMDQGREKFIRGALDKGYSESVAREVYNYIAKFANYGFNRAHAVAYSMLAYHMAYFKVHQPKSFFAAVMKADWGNKAKIYKYAHEVRARKIKLLKPDINQSLGSFTVRQNGIQVGLKMVKGVASPFVNHILEIRKEKGAFTSLRDFCEKIDSQFLSQDPIEALILVGAFDQMGPNRRTMLAGLEATIEFVAKSSGNITLFDTLKPRQEDLEEFSPKDLIQYEEELTGFYFSSHPLSRYDSLRQDLKTSFIADLEEGQSCQVLGQLVQVRKTQTRNQQPMAFVSLADQTGQISLVVFPNVYRECLPYLKEGVVLVVSGKVEVRKGEIQLKVQTMKEASQVQKETKQLYLKFADLNQDKESFRQVQKILARHPGQKRVIVYDQASQQALQLKAKFNFDGRTDTLNQLQDLLGQDSCILK

SEQ ID NO: 4691 - DNA, 3324 bp, Alloiococcus otitidis; identical to SEQ ID NO: 4689
  CDS (46)..(3321)

SEQ ID NO: 4692 - protein, 1092 aa, Alloiococcus otitidis
MTFTHLQVTSAYTLMASTIQLPLLMDRLKELGMEAVALTDHNVMHGAVEFYQEAKKHGIKPIMGLRADLDEGITVTLLAKNKAGYQALLALSTDLQVNKQAITLDQVRSVAQDLYTIFPSSDPKVKADLLDKQASNLTAMTQNLPHSYLGLVPDQDQKIYQLARTLSDSGGLKVLALSDVRCLEESQVSTLEILSHIKANQKIQFDTQARENYALRSPQEMESFFNQVGLGQALKNTKDVAQSVDWSLDLGQAKLPAFDLPEGETKDSYLGKLAQKGLQERVPGYGQDYQDRLDKELAVISSMGFSDYFLIVWDLMQFARQEKIETGFGRGSAAASLVSYALYITGVDPIHYDLLFERFLNKDRFTMPDIDLDFPDNKRQVILDYVYRKYGPDHVAQILTFGTFAAKSSIREIMRTLGYKNEDMKTWSQAIPDTVNISLSKAYDESKDLQKLVQQSHENERIFAMAQDIEGLPRNYSTHAAGVVMSDQPLIHSLPLQDGNGKVPNTQFTMEDVEAVGLLKMDFLSLKNLTILADCLNFSQYEGQGGGISKQDIPIDDPKTLDLFARGDTNGVFQFEKEGIKKVLRQLQPTSFEDIVATNALYRPGPMGQIENYINRKHGQEKIIYPHEDLKDILEVTYGIIVYQEQVMQVATQLAGYSLSEADQLRRTMSKKIQSEMDQGREKFIRGALDKGYSESVAREVYNYIAKFANYGFNRAHAVAYSMLAYHMAYFKVHQPKSFFAAVMKADWGNKAKIYKYAHEVRARKIKLLKPDINQSLGSFTVRQNGIQVGLKMVKGVASPFVNHILEIRKEKGAFTSLRDFCEKIDSQFLSQDPIEALILVGAFDQMGPNRRTMLAGLEATIEFVAKSSGNITLFDTLKPRQEDLEEFSPKDLIQYEEELTGFYFSSHPLSRYDSLRQDLKTSFIADLEEGQSCQVLGQLVQVRKTQTRNQQPMAFVSLADQTGQISLVVFPNVYRECLPYLKEGVVLVVSGKVEVRKGEIQLKVQTMKEASQVQKETKQLYLKFADLNQDKESFRQVQKILARHPGQKRVIVYDQASQQALQLKAKFNFDGRTDTLNQLQDLLGQDSCILK

SEQ ID NO: 4693 - DNA, 3324 bp, Alloiococcus otitidis; identical to SEQ ID NO: 4689
  CDS (10)..(3321)

SEQ ID NO: 4694 - protein, 1104 aa, Alloiococcus otitidis
MKQICLRRRGDKMTFTHLQVTSAYTLMASTIQLPLLMDRLKELGMEAVALTDHNVMHGAVEFYQEAKKHGIKPIMGLRADLDEGITVTLLAKNKAGYQALLALSTDLQVNKQAITLDQVRSVAQDLYTIFPSSDPKVKADLLDKQASNLTAMTQNLPHSYLGLVPDQDQKIYQLARTLSDSGGLKVLALSDVRCLEESQVSTLEILSHIKANQKIQFDTQARENYALRSPQEMESFFNQVGLGQALKNTKDVAQSVDWSLDLGQAKLPAFDLPEGETKDSYLGKLAQKGLQERVPGYGQDYQDRLDKELAVISSMGFSDYFLIVWDLMQFARQEKIETGFGRGSAAASLVSYALYITGVDPIHYDLLFERFLNKDRFTMPDIDLDFPDNKRQVILDYVYRKYGPDHVAQILTFGTFAAKSSIREIMRTLGYKNEDMKTWSQAIPDTVNISLSKAYDESKDLQKLVQQSHENERIFAMAQDIEGLPRNYSTHAAGVVMSDQPLIHSLPLQDGNGKVPNTQFTMEDVEAVGLLKMDFLSLKNLTILADCLNFSQYEGQGGGISKQDIPIDDPKTLDLFARGDTNGVFQFEKEGIKKVLRQLQPTSFEDIVATNALYRPGPMGQIENYINRKHGQEKIIYPHEDLKDILEVTYGIIVYQEQVMQVATQLAGYSLSEADQLRRTMSKKIQSEMDQGREKFIRGALDKGYSESVAREVYNYIAKFANYGFNRAHAVAYSMLAYHMAYFKVHQPKSFFAAVMKADWGNKAKIYKYAHEVRARKIKLLKPDINQSLGSFTVRQNGIQVGLKMVKGVASPFVNHILEIRKEKGAFTSLRDFCEKIDSQFLSQDPIEALILVGAFDQMGPNRRTMLAGLEATIEFVAKSSGNITLFDTLKPRQEDLEEFSPKDLIQYEEELTGFYFSSHPLSRYDSLRQDLKTSFIADLEEGQSCQVLGQLVQVRKTQTRNQQPMAFVSLADQTGQISLVVFPNVYRECLPYLKEGVVLVVSGKVEVRKGEIQLKVQTMKEASQVQKETKQLYLKFADLNQDKESFRQVQKILARHPGQKRVIVYDQASQQALQLKAKFNFDGRTDTLNQLQDLLGQDSCILK

SEQ ID NO: 4695 - DNA, 336 bp, Alloiococcus otitidis
  CDS (55)..(333)
agctggcggaggacttttttgattccctctttttcaaattggaagaccccatttgtgtctccccgggcaaaaagatccagggtcttagggtcgtcgattggtatatcttgtttacttataccccctccctgcccttcatactggctaaagttcaagcagtctgctaggatggttaaattttttaaactcaaaaagtccatcttgagtaagccgaccgcttcaacatcctccatggtaaattgggtgttggggacctttccgttgccatcttgtaggggaagggaatggattaggggctggtctgacatgacgacaccggccgcatgggttgaatag

SEQ ID NO: 4696 - protein, 93 aa, Alloiococcus otitidis
MSPRAKRSRVLGSSIGISCLLIPPPCPSYWLKFKQSARMVKFFKLKKSILSKPTASTSSMVNWVLGTFPLPSCRGREWIRGWSDMTTPAAWVE

SEQ ID NO: 4697 - DNA, 354 bp, Alloiococcus otitidis
  CDS (13)..(351)
agggggattgaaatggctgaacaagaagaagtatggtcgcaagaagagatcgaccatatcaaggataaaattatgcaggccatggaagccgtcatcgatccggaattagggattgatattgtcaacttaggattgatttatgaagttaatgtttttaacggtggttattgcgaaatgaaaataaccttgaccactatgggctgccccttggctgatgtgatcacagaagatatccataaggccatggaagagattgatgagatcaatgaactggatgtcaagctcgtctggtaccctgcctgggatacttctcgcatgacccggtatgcccgtattgccctaggtattcggtaa

SEQ ID NO: 4698 - protein, 113 aa, Alloiococcus otitidis
MAEQEEVWSQEEIDHIKDKIMQAMEAVIDPELGIDIVNLGLIYEVNVFNGGYCEMKITLTTMGCPLADVITEDIHKAMEEIDEINELDVKLVWYPAWDTSRMTRYARIALGIR

SEQ ID NO: 4699 - DNA, 360 bp, Alloiococcus otitidis
  CDS (34)..(357)
gcactggtcacttgtaagtgggtaaaagtcatcttgtcacctcttcgtctaagacatatttgtttcaatcttttattttatctcgctagctcgttagaagcctgttgcaagcaaaaagaaaaggcgcatgacacgacgtggtcatggccctcttcttttaaaatcttgttttaccgaatacctagggcaatacgggcataccgggtcatgcgagaagtatcccaggcagggtaccagacgagcttgacatccagttcattgatctcatcaatctcttccatggccttatggatatcttctgtgatcacatcagccaaggggcagcccatagtggtcaaggttattttcatttcgcaataa

SEQ ID NO: 4700 - protein, 108 aa, Alloiococcus otitidis
MSPLRLRHICFNLLFYLASSLEACCKQKEKAHDTTWSWPSSFKILFYRIPRAIRAYRVMREVSQAGYQTSLTSSSLISSISSMALWISSVITSAKGQPIVVKVIFISQ

SEQ ID NO: 4701 - DNA, 237 bp, Alloiococcus otitidis
  CDS (4)..(234)
tttttgattcatcttatcctcctagtcagggtatttttaccaatattaccacaaacgaagcaaaaagctaagttgtctagactagacaagagacatggttatggtaaactaaagataagtatagatagagggggattgaaatggctgaacaagaagaagtatggtcgcaagaagagatcgaccatatcaaggataaaattatgcaggccatggaagccgtcatcgatccggaattag

SEQ ID NO: 4702 - protein, 77 aa, Alloiococcus otitidis
MIHLILLVRVFLPILPQTKQKAKLSRLDKRHGYGKLKISIDRGGLKWLNKKKYGRKKRSTISRIKLCRPWKPSSIRN

SEQ ID NO: 4703 - DNA, 822 bp, Alloiococcus otitidis
  CDS (10)..(819)
gaggataagatgaatcaaaaattaattgccattgacttggacggaacgaccctgaacacccagcaaaaaatttccaaacggaccatccgggttataaaggccctccaagaggcgggacaccttgtgaccattgtgactgggcggccctaccggacaagctttaactattaccaagacctgggcctcaaaacccccatggttaattttaacggagcttactgccaccacccccaagaaaaaaactggtcgcctggctaccgaatcaccctgcctagcgatgtggttagtgaattattccggctgaagcataatgacaaggtcaagctagtttcagctgaagtggatgattcagtttatacgtcaagtcactatatcccctaccctgattttttcccacatggaccaggtcaagccaaatatcttggcaaccaggtctttaaccaagaagccacctgtgtgaatgtctttacccaagacaagtacttgcagcggaagttggaaaaagaaattattgcagactacggtaattttgtggaagtccggacttggggtggctttgccccttgcctggaaattgtctcctccggcacccaaaaggcaatgggtttggaacaagtggctaagtactacgggatagaccgggatgacatcttagcttttggcgatgaaaacaatgactatgaaatgatccagtatgccggcattggggtagccatgaataatgctattttaccgctaaaagagattgctaacgacattaccccctacagcaatgatgaagatggtctggctaggtacctagaaaattacttcaatgtgtag

SEQ ID NO: 4704 - protein, 270 aa, Alloiococcus otitidis
MNQKLIAIDLDGTTLNTQQKISKRTIRVIKALQEAGHLVTIVTGRPYRTSFNYYQDLGLKTPMVNFNGAYCHHPQEKNWSPGYRITLPSDVVSELFRLKHNDKVKLVSAEVDDSVYTSSHYIPYPDFFPHGPGQAKYLGNQVFNQEATCVNVFTQDKYLQRKLEKEIIADYGNFVEVRTWGGFAPCLEIVSSGTQKAMGLEQVAKYYGIDRDDILAFGDENNDYEMIQYAGIGVAMNNAILPLKEIANDITPYSNDEDGLARYLENYFNV

SEQ ID NO: 4705 - DNA, 1938 bp, Alloiococcus otitidis
  CDS (34)..(1935)
gataagtatattgaccttatagggggaattattatgtcattaagaaagaaatatgccatgctagtcggatcagccagtctagctctactcttagtcgcttgtggcggcgaaagtaatgacgggggcaacgggggcgcagaaacagaagaaactaccagcgaagagactggtgaggaagcaggtcaagaaggcgaaggttctggtgaagactccggtgaaggggaccaggctgcttctgtaccggaatttgaatccactgtatccaatgaaggcgaccctatcgatggcggtgtagcccaggttgggatcgtttcagacacagcttggactggtatctttgaccaccaattgtatcaaattaatacggactccaccatcggaagttacttcttaggtaatctattaacccaggatgaaaacttcgccctagtgggtggagaagaatggggaacagctgcggatatcgaatttgacgaagccaatgctaccgcaaccattaccgtccgtgacggagtctactggcatgacggcgagcaggttaccgcagacgacgtagtctttgcccacgaaattattggggacccagactacactggtatccggtatggggatgaatttaccaatattgaagggatggaagaattcaaggcaggagaagctgactctatctcaggtttggaattgtctgaggatcaaatgtccgttaccatccactacaaggactttaaccctaaaatgacccaggccggtgggggcgtttggtcttatgctgccccaagacactacttgggtgatattccagctgctgaccttgaatcccaccctaatatccgtgagaacccaatcggctttggtcctttcaaagttgacaacgtggtccctggggagtccttagagctatccgcttttgaagactactatgacggagcgccgaagatcgacgggattaccattgaacggattccggtatcaggagccgtcgaagcccttagagccggggaatttgactgggttgactccatgccgaccgaccagtttgataccttccaggacggcattcctggctacactaccatgggctatccaggacagtcttacgactaccttggctttaagatgggtgaatgggacagtgaaagtcaaagtgttcaatttaacccagatgctaaaatggctgacaaaaacttgcgtcaagccatgggatatgctttggacattgaccgggttggggagactttctacaacggtctacgacgccgggccaactcccacattgtaccgaactttcctgacttccaccgggatgatttagagggctacccatatgacccagataaagccaaccaattactggacgaagccggctatgaagatactgacggggatggcttccgggaagacccgaatggcgatccattagaaatcacctatgccgctcgtgcggggtcagaagtggctgaaccaattgcccaatactatatccaagcttgggaagaaattggccttaacgtttccctcttagaaggacgactccacgaagttaatgccttctacgaccgagttcaaggggacgatccagctattgatgtctatgaagcgggttggggagtgggatccgaccctacaccagatggcctatacggaccaaatgcgccatttaactacccacgttacgaaagtgaagaaaacaaccaattcctagcagacctggtatcggatgaatcctttgatgatgaataccgcacccaagtcttctatgactggcaagaattcttcatggatgaagccccaacaatcccgacattctggcgaacagagttgcagttggttaacgaccgggtatcccaattcgtacacagttcagtccctggtgcagaccctcaagaatacgggctcaaccaaattgaattgttagctgatcaacctgtaacagaataa

SEQ ID NO: 4706 - protein, 634 aa, Alloiococcus otitidis
MSLRKKYAMLVGSASLALLLVACGGESNDGGNGGAETEETTSEETGEEAGQEGEGSGEDSGEGDQAASVPEFESTVSNEGDPIDGGVAQVGIVSDTAWTGIFDHQLYQINTDSTIGSYFLGNLLTQDENFALVGGEEWGTAADIEFDEANATATITVRDGVYWHDGEQVTADDVVFAHEIIGDPDYTGIRYGDEFTNIEGMEEFKAGEADSISGLELSEDQMSVTIHYKDFNPKMTQAGGGVWSYAAPRHYLGDIPAADLESHPNIRENPIGFGPFKVDNVVPGESLELSAFEDYYDGAPKIDGITIERIPVSGAVEALRAGEFDWVDSMPTDQFDTFQDGIPGYTTMGYPGQSYDYLGFKMGEWDSESQSVQFNPDAKMADKNLRQAMGYALDIDRVGETFYNGLRRRANSHIVPNFPDFHRDDLEGYPYDPDKANQLLDEAGYEDTDGDGFREDPNGDPLEITYAARAGSEVAEPIAQYYIQAWEEIGLNVSLLEGRLHEVNAFYDRVQGDDPAIDVYEAGWGVGSDPTPDGLYGPNAPFNYPRYESEENNQFLADLVSDESFDDEYRTQVFYDWQEFFMDEAPTIPTFWRTELQLVNDRVSQFVHSSVPGADPQEYGLNQIELLADQPVTE

SEQ ID NO: 4707 - DNA, 990 bp, Alloiococcus otitidis
  CDS (736)..(987)
gatagattaaagctagaaaggacggagcatatgccgaaagttgatagtaactatgcggagtctgtggccagtgacgttgaaaaatcgacaccacctttaggctttaaagttatcatccgtgaatttaaaaaagataaagttgccttgactgccttgatcatcttaatcttgattgcactttttgtcgtcgcctggaccatccgcttagatgtcccagaagttatgcgggttgatgtcttcaaccgcttccacccgccggtagaatttgaatggtctaacttcatcgatgcttggaacggggagcgaacctacctcctaggggctgatgaaagtgggattgacgtttttcaccagctgattgtagggaccggtaattctgttatgattggtttcttggtaactactattatggccgttatcggtattggcctaggggtcatatcaggttattacgggggagctgttgacaatgccatcatgcggttcactgactttatcatgattttaccgacaacaatgatcgttatcgtatttattgttattattccagaagtaacaattgcatcatttgtttttattatgagtatcttcgcttggaccggtttctgccgtaccatccgcagtcgggccttgtcagaaggggagctggattatatctctgcttctaagaccatggggacaccgacttggaagattatcctaagtgaaatgttacctaacttggcatccttaattatgatccagttgattttatcttacgcagctaatatcggcttagagacaggtttgaccttcctaggctttggcctaccgccagagatcccaactttgggtaccttggtatctgctgcaacttctccagagaacctggagcttagaccttgggtttggttgccggcatcattgactatcctaaccttgatgctgtgtataaactacgtcggacaggctcttaaacggtcaaccgacgctaaacaacgtttaggataa

SEQ ID NO: 4708 - protein, 84 aa, Alloiococcus otitidis
MIQLILSYAANIGLETGLTFLGFGLPPEIPTLGTLVSAATSPENLELRPWVWLPASLTILTLMLCINYVGQALKRSTDAKQRLG

SEQ ID NO: 4709 - DNA, 990 bp, Alloiococcus otitidis; identical to SEQ ID NO: 4707
  CDS (499)..(987)

SEQ ID NO: 4710 - protein, 163 aa, Alloiococcus otitidis
MILPTTMIVIVFIVIIPEVTIASFVFIMSIFAWTGFCRTIRSRALSEGELDYISASKTMGTPTWKIILSEMLPNLASLIMIQLILSYAANIGLETGLTFLGFGLPPEIPTLGTLVSAATSPENLELRPWVWLPASLTILTLMLCINYVGQALKRSTDAKQRLG

SEQ ID NO: 4711 - DNA, 990 bp, Alloiococcus otitidis; identical to SEQ ID NO: 4707
  CDS (478)..(987)

SEQ ID NO: 4712 - protein, 170 aa, Alloiococcus otitidis
MRFTDFIMILPTTMIVIVFIVIIPEVTIASFVFIMSIFAWTGFCRTIRSRALSEGELDYISASKTMGTPTWKIILSEMLPNLASLIMIQLILSYAANIGLETGLTFLGFGLPPEIPTLGTLVSAATSPENLELRPWVWLPASLTILTLMLCINYVGQALKRSTDAKQRLG

SEQ ID NO: 4713 - DNA, 990 bp, Alloiococcus otitidis; identical to SEQ ID NO: 4707
  CDS (31)..(987)

SEQ ID NO: 4714 - protein, 319 aa, Alloiococcus otitidis
MPKVDSNYAESVASDVEKSTPPLGFKVIIREFKKDKVALTALIILILIALFVVAWTIRLDVPEVMRVDVFNRFHPPVEFEWSNFIDAWNGERTYLLGADESGIDVFHQLIVGTGNSVMIGFLVTTIMAVIGIGLGVISGYYGGAVDNAIMRFTDFIMILPTTMIVIVFIVIIPEVTIASFVFIMSIFAWTGFCRTIRSRALSEGELDYISASKTMGTPTWKIILSEMLPNLASLIMIQLILSYAANIGLETGLTFLGFGLPPEIPTLGTLVSAATSPENLELRPWVWLPASLTILTLMLCINYVGQALKRSTDAKQRLG

SEQ ID NO: 4715 - DNA, 1008 bp, Alloiococcus otitidis
  CDS (592)..(1005)
ccgtcaggcgaaagaagtcgaaactgcaaaagggggacaagcataatgtggaaaacagttgttagacggattttaattatgatcccccagatcattttgttaagtctattagtctttatcgttgctaattttatgcctggggatccgtttacaggcctaatcgacccgaatatggatgctaaacagattgaacagatgcgtgaagctgctggattaaatgaccccttgccggttcggtattttaactgggtcaccaatgccttgcaaggagactttggacgaagttttacccaccgggtaccggtcgctaccattattggtcagcgggccgccaactccattcgattggggattgtatcgatcttcttctcctacctgattgccctaccatttggactttttgccggccggtacaaggattcctggtttgactcacttgtcttgatatataactatgtctcctatgccatcccagtctttgtcctagccttgttaatggtctacatatttggctaccgacttggttggttcccaacgcgtgggacggttaatgtcaacttaagaccaggaacaatagaatactatctcgatatgatctaccgcttgatcctacctggctttaccagtggggtgttagggactgtctccattacccaaaccctaaggagtgaggttatcgacaccaagagtcgggattttgtccgcacagctcggtccaaaggtgttccagtcaataaggtttacactaaacacattttccggaattccttcttaccgattgcctcttccattggtttcatcattgttaccttgctaaatggttccatctttattgaacaaatttttgcttacaatggtatgggggtcctcttccttaacagtattactggtcgtgactatccagtcgttgtatccttagtcctactttacgggttaattgccattgtcggttcattgatatccgatatcatcatgaccatggttgacccaagaattaggatagattaa

SEQ ID NO: 4716 - protein, 138 aa, Alloiococcus otitidis
MIYRLILPGFTSGVLGTVSITQTLRSEVIDTKSRDFVRTARSKGVPVNKVYTKHIFRNSFLPIASSIGFIIVTLLNGSIFIEQIFAYNGMGVLFLNSITGRDYPVVVSLVLLYGLIAIVGSLISDIIMTMVDPRIRID

SEQ ID NO: 4717 - DNA, 1008 bp, Alloiococcus otitidis; identical to SEQ ID NO: 4715
  CDS (46)..(1005)

SEQ ID NO: 4718 - protein, 320 aa, Alloiococcus otitidis
MWKTVVRRILIMIPQIILLSLLVFIVANFMPGDPFTGLIDPNMDAKQIEQMREAAGLNDPLPVRYFNWVTNALQGDFGRSFTHRVPVATIIGQRAANSIRLGIVSIFFSYLIALPFGLFAGRYKDSWFDSLVLIYNYVSYAIPVFVLALLMVYIFGYRLGWFPTRGTVNVNLRPGTIEYYLDMIYRLILPGFTSGVLGTVSITQTLRSEVIDTKSRDFVRTARSKGVPVNKVYTKHIFRNSFLPIASSIGFIIVTLLNGSIFIEQIFAYNGMGVLFLNSITGRDYPVVVSLVLLYGLIAIVGSLISDIIMTMVDPRIRID

SEQ ID NO: 4719 - DNA, 1017 bp, Alloiococcus otitidis
  CDS (19)..(1014)
aggggaggaggaccaaaaatgagtttaattcaattagacaacctcaaggtccactacccgatccggggtggcatttttaataccatccaaacctatgtcaaggccgttgatggagtatccatcaccattgaatctggtaaaacatacggcttggtaggggaatccggatctggcaagacaaccattggcaaggcattaatcggtttggaatccattaccgacggccacatttactatgacggcaaggaagtgaccaataaggccagaagccggaagaaggaatatgccgattacaataaagatgtccagatgattttccaagactcaacctctgccttaaatcctaaaaaacggatccgggacgtcatcgctgaacccatcaataactatttcgactactccagtgatgaagttactagacgggttattgagttacttgagatcgtcggactaagtgaaaatgccatgtaccgttaccctcacgagttctctggagggcaaagacagcggatcggtgtagctcgggccgtagcttgcaatcctaaattaatcatagcagatgaacctacatcagccctagacttatcggtccaggcccaggtcttaaactttatgagacggatccagactgaatatggtttgagttacttgtttatctcccatgacctaggggttgtcaagcacatgtcagatgatattgccattatgcaccgaggacggtttgtagagcagggggccaaggacaagatttacaacaatccccaacacatctacaccaagcgtctattatcggccattcctgaaatgaatcccaatactcgggaggaacataaggctaaccgccagcgggtagaggctgaatatagggcccaagaagtagaatattacgatcctgacggaagagtttatgacttgacctactatgaagacaaccattttgtggcctttaaaccagacgctaaggatagtgaccgtcaggcgaaagaagtcgaaactgcaaaagggggacaagcataa

SEQ ID NO: 4720 - protein, 332 aa, Alloiococcus otitidis
MSLIQLDNLKVHYPIRGGIFNTIQTYVKAVDGVSITIESGKTYGLVGESGSGKTTIGKALIGLESITDGHIYYDGKEVTNKARSRKKEYADYNKDVQMIFQDSTSALNPKKRIRDVIAEPINNYFDYSSDEVTRRVIELLEIVGLSENAMYRYPHEFSGGQRQRIGVARAVACNPKLIIADEPTSALDLSVQAQVLNFMRRIQTEYGLSYLFISHDLGVVKHMSDDIAIMHRGRFVEQGAKDKIYNNPQHIYTKRLLSAIPEMNPNTREEHKANRQRVEAEYRAQEVEYYDPDGRVYDLTYYEDNHFVAFKPDAKDSDRQAKEVETAKGGQA

SEQ ID NO: 4721 - DNA, 333 bp, Alloiococcus otitidis
  CDS (7)..(330)
ccaataatggtagcgaccggtacccggtgggtaaaacttcgtccaaagtctccttgcaaggcattggtgacccagttaaaataccgaaccggcaaggggtcatttaatccagcagcttcacgcatctgttcaatctgtttagcatccatattcgggtcgattaggcctgtaaacggatccccaggcataaaattagcaacgataaagactaatagacttaacaaaatgatctgggggatcataattaaaatccgtctaacaactgttttccacattatgcttgtcccccttttgcagtttcgacttctttcgcctgacggtcactatccttag

SEQ ID NO: 4722 - protein, 108 aa, Alloiococcus otitidis
MVATGTRWVKLRPKSPCKALVTQLKYRTGKGSFNPAASRICSICLASIFGSIRPVNGSPGIKLATIKTNRLNKMIWGIIIKIRLTTVFHIMLVPLLQFRLLSPDGHYP

SEQ ID NO: 4723 - DNA, 408 bp, Alloiococcus otitidis
  CDS (91)..(405)
aggaaatccaagcagagactgaatcgggcattatcctcattacccacgacttgggctgttgtggccgagacagctgaccgggtagcagtcatgtatgcgggccaaattgtggaagaagcaccagtcgatgtcttgtttaacgaccctaaacacccttatacccggtccttactcaagtcagtcccccatgaattagaagaaggggaagaattgcacgtgattcaagggagtgtcccccctctagaagaattgccacggacaggtgaccgcttccgtaaccgggtgccttggttgccagatgaagcctttgacgagaacccgcaattaactgaaattgcacctaaccacaaggtcagagggaattcctggaagcatttctactttgaaggggaggaggaccaaaaatga

SEQ ID NO: 4724 - protein, 105 aa, Alloiococcus otitidis
MYAGQIVEEAPVDVLFNDPKHPYTRSLLKSVPHELEEGEELHVIQGSVPPLEELPRTGDRFRNRVPWLPDEAFDENPQLTEIAPNHKVRGNSWKHFYFEGEEDQK

SEQ ID NO: 4725 - DNA, 408 bp, Alloiococcus otitidis; identical to SEQ ID NO: 4723
  CDS (61)..(405)

SEQ ID NO: 4726 - protein, 115 aa, Alloiococcus otitidis
MAETADRVAVMYAGQIVEEAPVDVLFNDPKHPYTRSLLKSVPHELEEGEELHVIQGSVPPLEELPRTGDRFRNRVPWLPDEAFDENPQLTEIAPNHKVRGNSWKHFYFEGEEDQK

SEQ ID NO: 4727 - DNA, 690 bp, Alloiococcus otitidis
  CDS (112)..(687)
ggaggaaggaaagtggccattgaaaaccgcttattagaagtcaataacttagaagttggtttccgctttggggaagtctaccataacgcagttgatggtgtgtcgatcaccttggacaagaatgaaatcctagccatcgttggcgagtccggttgtggcaagtccaccttggcaactgctatcattggcttgcatgaccccctcaacactaagatttccggggagatcatctacaatgatttagatttaactaacttaagcgagaaactctacaacaagatcaggggtaacgacatcggtatgattttccaagacccgcttggatccttgaatcccgtgatgaccatttatgaccaaatcgccgagtctttgatttaccactctgaattaaatgaaaaagaaagacgggcccgggttttagaactcctgaaccaggttgggattccccgaccagagcaagtgatgaagtcttacccccatgaattatctggtgggatgagacagcgggtggtgatcgccatcgccttggccaataagccacccgtgattattgctgatgaacccactactgccttagacgtgactatccaagctcaaattttggacttgatgaaggaaatccaagcagagactgaatcgggcattatcctcattacccacgacttgggctgttgtggccgagacagctga

SEQ ID NO: 4728 - protein, 192 aa, Alloiococcus otitidis
MDKNEILAIVGESGCGKSTLATAIIGLHDPLNTKISGEIIYNDLDLTNLSEKLYNKIRGNDIGMIFQDPLGSLNPVMTIYDQIAESLIYHSELNEKERRARVLELLNQVGIPRPEQVMKSYPHELSGGMRQRVVIAIALANKPPVIIADEPTTALDVTIQAQILDLMKEIQAETESGIILITHDLGCCGRDS

SEQ ID NO: 4729 - DNA, 690 bp, Alloiococcus otitidis; identical to SEQ ID NO: 4727
  CDS (13)..(687)

SEQ ID NO: 4730 - protein, 225 aa, Alloiococcus otitidis
MAIENRLLEVNNLEVGFRFGEVYHNAVDGVSITLDKNEILAIVGESGCGKSTLATAIIGLHDPLNTKISGEIIYNDLDLTNLSEKLYNKIRGNDIGMIFQDPLGSLNPVMTIYDQIAESLIYHSELNEKERRARVLELLNQVGIPRPEQVMKSYPHELSGGMRQRVVIAIALANKPPVIIADEPTTALDVTIQAQILDLMKEIQAETESGIILITHDLGCCGRDS

SEQ ID NO: 4731 - DNA, 273 bp, Alloiococcus otitidis
  CDS (31)..(270)
gtaagaattaaaaacggaggtaatgaccaaatggaagaccaagaagtttttgacaaagttcaaagtattattgtagaccgcttaggtgtggatgaaagtaaaatcactcgagaaacccgcttccaagaagacatcggagccgactccttagatatcgtcgaactcatcatggaaatggaagactactttggccgtgaaatttcggatgaagaagcagagcagatgaccacagttggtaaggctgttgacttcatttcagaaaatattgactaa

SEQ ID NO: 4732 - protein, 80 aa, Alloiococcus otitidis
MEDQEVFDKVQSIIVDRLGVDESKITRETRFQEDIGADSLDIVELIMEMEDYFGREISDEEAEQMTTVGKAVDFISENID

SEQ ID NO: 4733 - DNA, 1020 bp, Alloiococcus otitidis
  CDS (16)..(1017)
actaaggaggcaaacatgagaattgcaattgacgcaatgggcggggataatgccccccaagctatcgtagctggagctataagagctgccagtgaactggaccaagtaagcctaatcttgtatggcgatgaagcaaaagtaaatgaattattgggtgagaaacctagtaatattgaagtggtagcaaccagtcaggttatccaaggggacgacgaacccgtccggtcagttagaagaaaaaaagatgcatccatggttcgggccgccagagatgtgaaagacggcaaggctaatgccttgatttctgccggcaataccggagccttgctgacagctgggaccttaattattggacgaataaaaggcttggaccgaccagccttgatggggaccctcccttctttatacagtgacaaggtctttcaactgatggacctgggagccaatgccgactgtaagcccctaaacctggaccaatttgctgtcttaggcagttattatgccaaaaatatgcggggggttgaccagcccaaggtagcccttttgaacaatgggactgaagacagcaagggcaatgacctatccaagtctgcctttgaactcttgtcaaaaaaccaggctattgattttatcggaaatattgaagcaaaagagatcctacaagcaccagcagatgtgattgtgacagatggctttaccggaaatgctgtcttgaagagtatggaaggaacagctaaggcagtgattgaccagatcaagtccaccatcaagtcgggtagtgtcaagactaaactcggcggcctcttgatcaaaaaagacttatccagcttaaaagacctcctggattattctaaaattggtggcgctgtcttgtttggcactcgggcaccagttattaaaacccatggatcggctaatgctgaagctctctaccacacggtcaaacaagccagagacattattgacagccaggccattcaagctctaagtcaatattttgaacaagagaaaataaagtga

SEQ ID NO: 4734 - protein, 334 aa, Alloiococcus otitidis
MRIAIDAMGGDNAPQAIVAGAIRAASELDQVSLILYGDEAKVNELLGEKPSNIEVVATSQVIQGDDEPVRSVRRKKDASMVRAARDVKDGKANALISAGNTGALLTAGTLIIGRIKGLDRPALMGTLPSLYSDKVFQLMDLGANADCKPLNLDQFAVLGSYYAKNMRGVDQPKVALLNNGTEDSKGNDLSKSAFELLSKNQAIDFIGNIEAKEILQAPADVIVTDGFTGNAVLKSMEGTAKAVIDQIKSTIKSGSVKTKLGGLLIKKDLSSLKDLLDYSKIGGAVLFGTRAPVIKTHGSANAEALYHTVKQARDIIDSQAIQALSQYFEQEKIK

SEQ ID NO: 4735 - DNA, 348 bp, Alloiococcus otitidis
  CDS (79)..(345)
tccaggaggtcttttaagctggataagtcttttttgatcaagaggccgccgagtttagtcttgacactacccgacttgatggtggacttgatctggtcaatcactgccttagctgttccttccatactcttcaagacagcatttccggtaaagccatctgtcacaatcacatctgctggtgcttgtaggatctcttttgcttcaatatttccgataaaatcaatagcctggttttttgacaagagttcaaaggcagacttggataggtcattgcccttgctgtcttcagtcccattgttcaaaagggctaccttgggctggtcaaccccccgcatatttttggcataa

SEQ ID NO: 4736 - protein, 89 aa, Alloiococcus otitidis
MVDLIWSITALAVPSILFKTAFPVKPSVTITSAGACRISFASIFPIKSIAWFFDKSSKADLDRSLPLLSSVPLFKRATLGWSTPRIFLA

SEQ ID NO: 4737 - DNA, 348 bp, Alloiococcus otitidis; identical to SEQ ID NO: 4735
  CDS (34)..(345)

SEQ ID NO: 4738 - protein, 104 aa, Alloiococcus otitidis
MIKRPPSLVLTLPDLMVDLIWSITALAVPSILFKTAFPVKPSVTITSAGACRISFASIFPIKSIAWFFDKSSKADLDRSLPLLSSVPLFKRATLGWSTPRIFLA

SEQ ID NO: 4739 - DNA, 2040 bp, Alloiococcus otitidis
  CDS (13)..(2037)
aggagcaagaccatgtcaatttatgacccggtaaaaaacttatctggagtagggaccaagcgtatggaggccctaaagcaacttggcattgagactatcatggacctcttgaccttttaccctttccgctatgaagacttaagggtccggaacattgaggagattgaagatcgcgaaaaagttgtcttaagagggcttgccgtttccgatggggtagtaagttacttcggccgaaccaaaagccggttaaaatttcgcctcaatgttgaccaggccattattccggtaactttttttaaccagccctatttaaaaaaacaagtccaggccaaccatgaactaacggtctttgggacctgggatttgaagcgccagtccctaaccgggatcaaaatattaaaagctggagaaagtgatagtcaagaggctgtttaccggtccaacaagcaaatcaagcagaatacaatttttaagttaatcaaacaggcttgggacaagtaccaggaccaaattccccagctgattccctatgacctgactcaaaaataccagctggatgactttcccactgctatacggaaaatccactttccaaaccaggacgatgaccttacccgggcccggaccagtcttatttttactgaattttttacttaccaattaagcctgcaaaaaattcgccgggaccattcccagaccaatcctggctctaccctccattacaatttgccagacttaaagaatttttttaaaagcctggattttgacttaacgggggcccaaaaaagggtagtcaatgaaatatgcaaggacttactccagcccaagcaaatgttccgacttttgcaaggggatgtcggtagtggcaaaacggtagtggcagcagcagctatctatgcggtttttactggtcgcaaacaggcggctatcatggcaccgactgaaatcttggccgaccaacactttgcaagttttaaggacttgtttgctggcactgacctcaaacaagccttactcaagtcttctacccccgccaaggaaagggaaaaaattttagtagatttagcccagggagaaatagacctgctggtggggacccatgccttaatccaggatgatgtcatctttaaagacctggccctggttgtcattgacgagcaacacaggtttggggttaagcagagggggaaattgcgggagaaaggcccggatccagatgtccttgccatgacagctacccccatcccccgaaccttgtccattaccgcttatggagagatggatacttctatcattgaccagatgccagcgggtcgcttaccggttaaaacgatttggttgcgtaatcaaaattccagtcaaatggttaactttatcaaaagagaattggaccaaggacggcaagcctacgtagtttcccccttgattgaagagtctgacaacctggacttgcaaaacgccttagacctctttgacctttataaccaggtctttactggctatcaagtgggccttctccatggccagatgaaaaaggaagaaagagaccaagttatggcagcctttaaagataaccaggtccaaattcttgtttcgacaacggtaatcgaagttggagttgatgtccaaaatgcaagcatcatgatcatccatgatgctgaccgttttggcctagcccagctccaccaattgcggggccgggttggtcgaggaacaagccaagcttattgtatccttattgctgaccccaagggagagaatggagtgaagcggatgcaggtaatgacagaatccaatgatggttttttcctcagcgagaaggacctaaccatgcgggggcctggagatgtcctagggagtatccagtcaggcttgccccagtttaaaattggcgacctagtggaagacgcacccattctggaaaaggccaggatagaaagcatccactacctcaatcaggacccagacttgtcccaaaatattgatttaaaaacttatcttctatataatcaaccaaatagcaaaggattgttagactaa

SEQ ID NO: 4740 - protein, 675 aa, Alloiococcus otitidis
MSIYDPVKNLSGVGTKRMEALKQLGIETIMDLLTFYPFRYEDLRVRNIEEIEDREKVVLRGLAVSDGVVSYFGRTKSRLKFRLNVDQAIIPVTFFNQPYLKKQVQANHELTVFGTWDLKRQSLTGIKILKAGESDSQEAVYRSNKQIKQNTIFKLIKQAWDKYQDQIPQLIPYDLTQKYQLDDFPTAIRKIHFPNQDDDLTRARTSLIFTEFFTYQLSLQKIRRDHSQTNPGSTLHYNLPDLKNFFKSLDFDLTGAQKRVVNEICKDLLQPKQMFRLLQGDVGSGKTVVAAAAIYAVFTGRKQAAIMAPTEILADQHFASFKDLFAGTDLKQALLKSSTPAKEREKILVDLAQGEIDLLVGTHALIQDDVIFKDLALVVIDEQHRFGVKQRGKLREKGPDPDVLAMTATPIPRTLSITAYGEMDTSIIDQMPAGRLPVKTIWLRNQNSSQMVNFIKRELDQGRQAYVVSPLIEESDNLDLQNALDLFDLYNQVFTGYQVGLLHGQMKKEERDQVMAAFKDNQVQILVSTTVIEVGVDVQNASIMIIHDADRFGLAQLHQLRGRVGRGTSQAYCILIADPKGENGVKRMQVMTESNDGFFLSEKDLTMRGPGDVLGSIQSGLPQFKIGDLVEDAPILEKARIESIHYLNQDPDLSQNIDLKTYLLYNQPNSKGLLD

SEQ ID NO: 4741 - DNA, 375 bp, Alloiococcus otitidis
  CDS (7)..(372)
gcggtaatggacaaggttcgggggatgggggtagctgtcatggcaaggacatctggatccgggcctttctcccgcaatttccccctctgcttaaccccaaacctgtgttgctcgtcaatgacaaccagggccaggtctttaaagatgacatcatcctggattaaggcatgggtccccaccagcaggtctatttctccctgggctaaatctactaaaattttttccctttccttggcgggggtagaagacttgagtaaggcttgtttgaggtcagtgccagcaaacaagtccttaaaacttgcaaagtgttggtcggccaagatttcagtcggtgccatgatagccgcctgtttgcgaccagtaaaaaccgcatag

SEQ ID NO: 4742 - protein, 122 aa, Alloiococcus otitidis
MDKVRGMGVAVMARTSGSGPFSRNFPLCLTPNLCCSSMTTRARSLKMTSSWIKAWVPTSRSISPWAKSTKIFSLSLAGVEDLSKACLRSVPANKSLKLAKCWSAKISVGAMIAACLRPVKTA

SEQ ID NO: 4743 - DNA, 1680 bp, Alloiococcus otitidis
  CDS (10)..(1677)
aaatataagatgaatgagataaaagcaaaagatttcaaaaatatggtcaataccggccgcaagcgcctggatgataatgcggaatatgtcaattcactcaatgttttcccagtacctgatggcgatacaggcacgaatatgaacttgactttttcaactgggacagaatcagttaatgaatcccagtccgaccaggtaggggaccttgctaagtccttatctaaaggtctcttgatgggggcccgggggaactcgggtgttatcctttcccagctttttagaggtttttctaaagcggtggaagacaaggaaacgttaagtgttcaagactttgccgatgcttttaaggctggtgtggattcagcctacaatgcggtcatgaaacctgttgaagggaccgttttgacagtggctagggaagcggcagaagctggcttagaagcagcccaaagtcaaaaggatattattggcttgatggaagcggtcttggaacaaggcaaggcctccctcaaaaaaacaccagacctattgcctgttttaaaagaagtcggagtcgttgacagtgggggtcaaggcttaatctatatttatgaaggattcttgtcagccctaactggagaagagattgttgaagatgacaacaaggctgacttagaccagttaatcaaggcggagcaccagcaaagtggtgtccatgatgcagttaagtcagaagacatcaagtatggttactgtacagaaattatggtgcgaatcggagaaggccggactgtagacagtgaatttgattatgacgaattccggtcttacttggacggcttaggggactccctcttggttgtggcagacgacgaaattatcaaagtccacgttcacactgaaaccccaggtgaggtcatgaattacggccaaaaatttgggtccttgattaagattaaagttgacaatatgagagagcaacactctcaattatccggcggttcatctgctggacaagatggttcagccaaagcccaagagaaaaaagacctggctgtagttgctgtggcagcaggtgagggtgtagcagacctcttccgatctatcggggtcgattatgttctaactgggggccaaaccatgaacccaagtacccaagacttggtgaaggccttggaccaggttcctgctgacaactacatcatcttgcctaataataagaacatcttcatgtcagccaagcaggcagtggatgttgcctcagccaatgtcaaggtggtagaaagccggaccatccagcaaggcttatcggctatgttaggatatgaccctaaccaggacctagaggctaatgcagaagccatggcagaggaatcttcctatgtcgtatccggtgaaatcacctcggccacccgcgataccgaaataaatggagtcgctattaagaaagatgactacatgggaattgtggatggcgacattgtcttagccaaaagtgaccttgaagactgcttgcaggccaccattcaatccatgctggaagaagacagtgagatcattaccattatctacggtgaaggtatcgaccaagacaccgcccaggctacgatcgatcgcttggttgaagtcttcccggactatgaaattgaatcacaccaaggcgatcaaccggtctacccttaccttatctcagtagaatag

SEQ ID NO: 4744 - protein, 556 aa, Alloiococcus otitidis
MNEIKAKDFKNMVNTGRKRLDDNAEYVNSLNVFPVPDGDTGTNMNLTFSTGTESVNESQSDQVGDLAKSLSKGLLMGARGNSGVILSQLFRGFSKAVEDKETLSVQDFADAFKAGVDSAYNAVMKPVEGTVLTVAREAAEAGLEAAQSQKDIIGLMEAVLEQGKASLKKTPDLLPVLKEVGVVDSGGQGLIYIYEGFLSALTGEEIVEDDNKADLDQLIKAEHQQSGVHDAVKSEDIKYGYCTEIMVRIGEGRTVDSEFDYDEFRSYLDGLGDSLLVVADDEIIKVHVHTETPGEVMNYGQKFGSLIKIKVDNMREQHSQLSGGSSAGQDGSAKAQEKKDLAVVAVAAGEGVADLFRSIGVDYVLTGGQTMNPSTQDLVKALDQVPADNYIILPNNKNIFMSAKQAVDVASANVKVVESRTIQQGLSAMLGYDPNQDLEANAEAMAEESSYVVSGEITSATRDTEINGVAIKKDDYMGIVDGDIVLAKSDLEDCLQATIQSMLEEDSEIITIIYGEGIDQDTAQATIDRLVEVFPDYEIESHQGDQPVYPYLISVE

SEQ ID NO: 4745 - DNA, 366 bp, Alloiococcus otitidis
  CDS (4)..(363)
gatatgtcactcctaattaacaatgaaaatggtaatattgaagtttcaaatgatgtgatagcaactatcgttggcggtgctgcaaccgagatcttcggcattgtgggcatggctagtcgcaagcaggtcagagatggcttaaacgagatcttaaagcgtgacaattacgctaaagggatcgaagtgcgacaagagcgagaccaagtcatcattgacgtctatatcattgtcagttatggcattaaaattactgaagtatctaaaaacgttcaagaacgggtacgctaccagctgaaatcgactttagggattgaggcttcttctgtaaatgtctttgtccaaggtgtccgtgtgtcaaatcgttag

SEQ ID NO: 4746 - protein, 120 aa, Alloiococcus otitidis
MSLLINNENGNIEVSNDVIATIVGGAATEIFGIVGMASRKQVRDGLNEILKRDNYAKGIEVRQERDQVIIDVYIIVSYGIKITEVSKNVQERVRYQLKSTLGIEASSVNVFVQGVRVSNR

SEQ ID NO: 4747 - DNA, 645 bp, Alloiococcus otitidis
  CDS (4)..(642)
gtcatgacgattcatattgttttaggagcccccttaagagcccaagacctggatttaaattaccaaaagggtgacctcgttttaggagttgacggaggaagtctcttggtcaaacaagctggctaccctctagaccttgccttgggagactttgattccttgacccagcaggaattagaagaggtggatgcctacgcaggggagcgttttgtcaagccagaccaggaccatactgattttgaactggccttagacctggctcgggaatatgacagggacgatttaatctatgtatataactttcaaggaggtcgggtcgaccattttatcagtatcagctatgtggtttacttagatcagtataaagacctcatcccacggttgtacttgcttgatcctgctaataccgtttccttttgccagcctgggacttaccagataaaaaaagagccaggcaaagactacctatcctttatagccatgacgccagtatccggcttatccctgtcgggggttaaataccccttggaagatgaggactttgcagtccctagagcccttatctctaacgaattcgctgggggagaggatatggtcttaagcttcagcagaggcttagtgatggtggttcaaagtaagggataa

SEQ ID NO: 4748 - protein, 213 aa, Alloiococcus otitidis
MTIHIVLGAPLRAQDLDLNYQKGDLVLGVDGGSLLVKQAGYPLDLALGDFDSLTQQELEEVDAYAGERFVKPDQDHTDFELALDLAREYDRDDLIYVYNFQGGRVDHFISISYVVYLDQYKDLIPRLYLLDPANTVSFCQPGTYQIKKEPGKDYLSFIAMTPVSGLSLSGVKYPLEDEDFAVPRALISNEFAGGEDMVLSFSRGLVMVVQSKG

SEQ ID NO: 4749 - DNA, 666 bp, Alloiococcus otitidis
  CDS (19)..(663)
accctagaggaggctattatgaaaattgcaccatccttattaagtgctgactttgccaacttgcaaagggatgtccaagaagttgaccaggctggggcggactggatccatattgatgtcatggacgggtcctttgtgcccaacttgacttttggccccaacttggtccaagcgatccggccccatactaacctacccctggatgttcacctcatggttaaccaaccggaaaaattcattgaagcttttgctaaagccggggccgactgcctgtcggtccaagtggagtcgacccagcatatccaccgggccatccaattgatcaaagaccagggtttgaaggctggcgctgtgattaacccaggaacacctaaccaagccttgacccccctattaagggacctcgattatgtcttggtaatgaccgttaacccaggctttggtggtcaggactttattccttcttgcctggacaagatagatcaattagcccaaactaggactgagcttgggttagactttgaaatccaagtggacgggggtatcaatgaccaaacggctaagcaagcttgggatgctggcgctgatatttttgtggctggttcttatatttttaaccaagggaaaagttccaaagaccaaatagccaagttaagaaaggggtga

SEQ ID NO: 4750 - protein, 215 aa, Alloiococcus otitidis
MKIAPSLLSADFANLQRDVQEVDQAGADWIHIDVMDGSFVPNLTFGPNLVQAIRPHTNLPLDVHLMVNQPEKFIEAFAKAGADCLSVQVESTQHIHRAIQLIKDQGLKAGAVINPGTPNQALTPLLRDLDYVLVMTVNPGFGGQDFIPSCLDKIDQLAQTRTELGLDFEIQVDGGINDQTAKQAWDAGADIFVAGSYIFNQGKSSKDQIAKLRKG

SEQ ID NO: 4751 - DNA, 894 bp, Alloiococcus otitidis
  CDS (13)..(891)
aaggagcggtttatgctagaagggcagattaccaaagccttgagtggattttattatgtaacaactgagcaaggacaaacttaccggaccaaggcaagggggcttttccgcaaagaaaagctaacccccttggttggggactatgtgacctttgacttagaggaagggcaagacggtaccatcgttgaagtcaaggaccggaaaaaccttctgacccggcctcctattgccaatattgacttggcctttgtcatctcatctgcggtcgaccccaaattttcccagcagcttttggaccggatgctggttgtcttggagtctatccacatccaaccagccatctatatctccaagctggacttggccccccaggacttggttcatgaaatcaaggctctgcaagattactaccaagacctaggctatgacttcctttgcccggaggacggccaggttgaccaggggcaaatgcaagccattataggccacaagcgggtggtttttatgggccagtcaggggttggtaagtcaagacttttgaaccagcttaatgaccagttgaacttattgaccggccaaacgtcaaaagccttgggacggggccgacacaccacccggcatgtggaactcctgcctatttttgaaggctacattgctgataccccaggtttttcttccctcgacttggaggggatcgaaaaggaagaattaagccaatacttcccagaattttgggcaagaagggcccaatgcaagttttcgggttgcctccactacaaggaacctaaatgtgccgtcaaagcaggtgtcgaaacaggagacctggcttcaaaccgctaccgccactatgtctattttttagaagaaataatgacacgcaagccaaaatactag

SEQ ID NO: 4752 - protein, 293 aa, Alloiococcus otitidis
MLEGQITKALSGFYYVTTEQGQTYRTKARGLFRKEKLTPLVGDYVTFDLEEGQDGTIVEVKDRKNLLTRPPIANIDLAFVISSAVDPKFSQQLLDRMLVVLESIHIQPAIYISKLDLAPQDLVHEIKALQDYYQDLGYDFLCPEDGQVDQGQMQAIIGHKRVVFMGQSGVGKSRLLNQLNDQLNLLTGQTSKALGRGRHTTRHVELLPIFEGYIADTPGFSSLDLEGIEKEELSQYFPEFWARRAQCKFSGCLHYKEPKCAVKAGVETGDLASNRYRHYVYFLEEIMTRKPKY

SEQ ID NO: 4753 - DNA, 2037 bp, Alloiococcus otitidis
  CDS (97)..(2034)
ttgacctattggcccatggagaggaggaggaccaaagtgagtgggaacaagattgataaccgctacaagatcaaaaagttaattggaacaggtggcatggccaaggtcttcctagcccgcgatatgtttttggaccgagatgtggcagttaaattattggcgagttcctttattgacgaccaagaaagcttaaaacgttttcaaagagaagccatctcgacgacggaattatcccatgaaaatatagtcagcatctacgatgttggcgaaggagcccacccctttatcgtgatggagtttgtggacggaaccgacctcaagacttacataaaagaccactatcctatccccaatgatacgataatcgacattatgagccagatcctaaacgggattgaatatgcccacagccggggcatcatccaccgtgacatcaaaccccaaaatattttaatggattctagtggccaggtgaagattacggacttcggtattgccctagcagtttcccagcattctattacccagaccaattcccttttaggaacggttcactatatgtcgcctgaacaggctaagggagggatggcgacccaaaagtccgatatttattctttagggattgtcttgtatgagttgttaacgggccaagttccctttagtggcgaatctccggtatcgattgccctcaagcacttccaggaggatctaccggatattagggagcaaaatcccaacgtgccccagtccttggctaatgttgtccttaaggctacctgcaaagatcctgacttacgctatgactccgtctatgatatgagacaggacttaatgacagttttagacccaagccggcaaaatgagccagtatttgttcctaagtccagggaccaagaagataccatcgtcatgtcacccataggagaccaggttagtcaggaccaattaggagatagtcatgataacccaacaggccccggacctagaccaagtcctgccactaagaaaaaaagacgctggccccttgtcttagcccttatcatcttagcccttctcctaggggggattgtttactttattatgagtgctgcccccaaccaggtggaattgcctgacttggaaaaccggacacttgaagaagccgagactattttagcagacctgcagttgcaagtggatgaagtgatcgaagagcctagtgaggagatagaagaaggtcatgtgacccggtctaaccctggtgctggcaccaaggtggaccttgacacggagattgacctctttgtcagcaccggcagtgacttgtttagccttgaggactacaccggcaggaactatgaagaagtcagggccgttttaacggaaattggctttacggttgaaagcagagaagttagccataatgacattgaaagtggccaaattgtttctcaagacctctcaccaggccaggaagtgaagccagaggatacgacgatcacatttgatgtttctacaggtccggaaggctttgcctttagggacttaacaggttatacccgggttggggttgacgattatattgctgacaataatcttaacctgacagtcgactatcaatcgtcagaccaggtggaagaaggcctggtggtggaccagagtccggagccagggaccaccttgtttgaaaatgatagtgtgactgttatcttctcaactggacctgctgccggtcaggatgaagaagacgaaggagaagagggggaagaccaggaagaagaccaagaccaagctaactatgagagcttctcccgcctggttcaaatccagtaccagccaagtggacaagaggatgaccaagaagatcctgtcccaaatgaaatagaagtttacattgatgacgaggaaaacagtatggacgagcctgtcttatcctttgaaattacagaggatgttacccggacccttaactttgtcgttaaggaaggggagtctgcctcttaccggatagtgagggatgggcaggtcattaaggaagaagaagttcaaaatatttaa

SEQ ID NO: 4754 - protein, 646 aa, Alloiococcus otitidis
MAKVFLARDMFLDRDVAVKLLASSFIDDQESLKRFQREAISTTELSHENIVSIYDVGEGAHPFIVMEFVDGTDLKTYIKDHYPIPNDTIIDIMSQILNGIEYAHSRGIIHRDIKPQNILMDSSGQVKITDFGIALAVSQHSITQTNSLLGTVHYMSPEQAKGGMATQKSDIYSLGIVLYELLTGQVPFSGESPVSIALKHFQEDLPDIREQNPNVPQSLANVVLKATCKDPDLRYDSVYDMRQDLMTVLDPSRQNEPVFVPKSRDQEDTIVMSPIGDQVSQDQLGDSHDNPTGPGPRPSPATKKKRRWPLVLALIILALLLGGIVYFIMSAAPNQVELPDLENRTLEEAETILADLQLQVDEVIEEPSEEIEEGHVTRSNPGAGTKVDLDTEIDLFVSTGSDLFSLEDYTGRNYEEVRAVLTEIGFTVESREVSHNDIESGQIVSQDLSPGQEVKPEDTTITFDVSTGPEGFAFRDLTGYTRVGVDDYIADNNLNLTVDYQSSDQVEEGLVVDQSPEPGTTLFENDSVTVIFSTGPAAGQDEEDEGEEGEDQEEDQDQANYESFSRLVQIQYQPSGQEDDQEDPVPNEIEVYIDDEENSMDEPVLSFEITEDVTRTLNFVVKEGESASYRIVRDGQVIKEEEVQNI

SEQ ID NO: 4755 - DNA, 2037 bp, Alloiococcus otitidis; identical to SEQ ID NO: 4753
  CDS (16)..(2034)

SEQ ID NO: 4756 - protein, 673 aa, Alloiococcus otitidis
MERRRTKVSGNKIDNRYKIKKLIGTGGMAKVFLARDMFLDRDVAVKLLASSFIDDQESLKRFQREAISTTELSHENIVSIYDVGEGAHPFIVMEFVDGTDLKTYIKDHYPIPNDTIIDIMSQILNGIEYAHSRGIIHRDIKPQNILMDSSGQVKITDFGIALAVSQHSITQTNSLLGTVHYMSPEQAKGGMATQKSDIYSLGIVLYELLTGQVPFSGESPVSIALKHFQEDLPDIREQNPNVPQSLANVVLKATCKDPDLRYDSVYDMRQDLMTVLDPSRQNEPVFVPKSRDQEDTIVMSPIGDQVSQDQLGDSHDNPTGPGPRPSPATKKKRRWPLVLALIILALLLGGIVYFIMSAAPNQVELPDLENRTLEEAETILADLQLQVDEVIEEPSEEIEEGHVTRSNPGAGTKVDLDTEIDLFVSTGSDLFSLEDYTGRNYEEVRAVLTEIGFTVESREVSHNDIESGQIVSQDLSPGQEVKPEDTTITFDVSTGPEGFAFRDLTGYTRVGVDDYIADNNLNLTVDYQSSDQVEEGLVVDQSPEPGTTLFENDSVTVIFSTGPAAGQDEEDEGEEGEDQEEDQDQANYESFSRLVQIQYQPSGQEDDQEDPVPNEIEVYIDDEENSMDEPVLSFEITEDVTRTLNFVVKEGESASYRIVRDGQVIKEEEVQNI

SEQ ID NO: 4757 - DNA, 2037 bp, Alloiococcus otitidis; identical to SEQ ID NO: 4753
  CDS (1)..(2034)

SEQ ID NO: 4758 - protein, 678 aa, Alloiococcus otitidis
MTYWPMERRRTKVSGNKIDNRYKIKKLIGTGGMAKVFLARDMFLDRDVAVKLLASSFIDDQESLKRFQREAISTTELSHENIVSIYDVGEGAHPFIVMEFVDGTDLKTYIKDHYPIPNDTIIDIMSQILNGIEYAHSRGIIHRDIKPQNILMDSSGQVKITDFGIALAVSQHSITQTNSLLGTVHYMSPEQAKGGMATQKSDIYSLGIVLYELLTGQVPFSGESPVSIALKHFQEDLPDIREQNPNVPQSLANVVLKATCKDPDLRYDSVYDMRQDLMTVLDPSRQNEPVFVPKSRDQEDTIVMSPIGDQVSQDQLGDSHDNPTGPGPRPSPATKKKRRWPLVLALIILALLLGGIVYFIMSAAPNQVELPDLENRTLEEAETILADLQLQVDEVIEEPSEEIEEGHVTRSNPGAGTKVDLDTEIDLFVSTGSDLFSLEDYTGRNYEEVRAVLTEIGFTVESREVSHNDIESGQIVSQDLSPGQEVKPEDTTITFDVSTGPEGFAFRDLTGYTRVGVDDYIADNNLNLTVDYQSSDQVEEGLVVDQSPEPGTTLFENDSVTVIFSTGPAAGQDEEDEGEEGEDQEEDQDQANYESFSRLVQIQYQPSGQEDDQEDPVPNEIEVYIDDEENSMDEPVLSFEITEDVTRTLNFVVKEGESASYRIVRDGQVIKEEEVQNI

SEQ ID NO: 4759 - DNA, 783 bp, Alloiococcus otitidis
  CDS (280)..(780)
aaagaggtgactcatatgcaagtcgtttttaaatccatcaaaggtaaaaggaagtctaaccaggattatattcgggtgaccaagagccaaagtaacgtgtgcctagctgtcttgtgtgacggcatgggaggccaccaggcaggggatttggccagtaagatagcagccgagaacctggctaagcattggcaagaatccgccctaactgccaaagaagacatcattttatggttaaaagacaagcttaaccagaccaatcaactgatttaccaagaaagtttgaaagacccatcagtttttggcatgggaacgacggcggtcttggcggttttcttagataaagaagttatttttgccaatgttggagattctagggcctaccaggctaaccagaacggagttgaattagtcactgaagaccactcttttgcctatgaattatacttaaaaggtcaaatcacagaagaagaggcccgaacccatcagcagaggaacatgctaacccgatgtttaggtttgccccagtccccccaagtcgatatttttgacattcccatccaaaacaagtactatatcatgctttgctcggacggcttgtcggacgtattgaccaaccaggcgataggagaaattttgggacaagagtcaaagttagaggataaactaaccaaattagttgaaacagcttatgatggagggtcaactgataatattacagtgattttagttgacctattggcccatggagaggaggaggaccaaagtgagtgggaacaagattga

SEQ ID NO: 4760 - protein, 167 aa, Alloiococcus otitidis
MKDPSVFGMGTTAVLAVFLDKEVIFANVGDSRAYQANQNGVELVTEDHSFAYELYLKGQITEEEARTHQQRNMLTRCLGLPQSPQVDIFDIPIQNKYYIMLCSDGLSDVLTNQAIGEILGQESKLEDKLTKLVETAYDGGSTDNITVILVDLLAHGEEEDQSEWEQD

SEQ ID NO: 4761 - DNA, 783 bp, Alloiococcus otitidis; identical to SEQ ID NO: 4759
  CDS (124)..(780)

SEQ ID NO: 4762 - protein, 219 aa, Alloiococcus otitidis
MGGHQAGDLASKIAAENLAKHWQESALTAKEDIILWLKDKLNQTNQLIYQESLKDPSVFGMGTTAVLAVFLDKEVIFANVGDSRAYQANQNGVELVTEDHSFAYELYLKGQITEEEARTHQQRNMLTRCLGLPQSPQVDIFDIPIQNKYYIMLCSDGLSDVLTNQAIGEILGQESKLEDKLTKLVETAYDGGSTDNITVILVDLLAHGEEEDQSEWEQD

SEQ ID NO: 4763 - DNA, 783 bp, Alloiococcus otitidis; identical to SEQ ID NO: 4759
  CDS (16)..(780)

SEQ ID NO: 4764 - protein, 255 aa, Alloiococcus otitidis
MQVVFKSIKGKRKSNQDYIRVTKSQSNVCLAVLCDGMGGHQAGDLASKIAAENLAKHWQESALTAKEDIILWLKDKLNQTNQLIYQESLKDPSVFGMGTTAVLAVFLDKEVIFANVGDSRAYQANQNGVELVTEDHSFAYELYLKGQITEEEARTHQQRNMLTRCLGLPQSPQVDIFDIPIQNKYYIMLCSDGLSDVLTNQAIGEILGQESKLEDKLTKLVETAYDGGSTDNITVILVDLLAHGEEEDQSEWEQD

SEQ ID NO: 4765 - DNA, 783 bp, Alloiococcus otitidis; identical to SEQ ID NO: 4759
  CDS (7)..(780)

SEQ ID NO: 4766 - protein, 258 aa, Alloiococcus otitidis
MTHMQVVFKSIKGKRKSNQDYIRVTKSQSNVCLAVLCDGMGGHQAGDLASKIAAENLAKHWQESALTAKEDIILWLKDKLNQTNQLIYQESLKDPSVFGMGTTAVLAVFLDKEVIFANVGDSRAYQANQNGVELVTEDHSFAYELYLKGQITEEEARTHQQRNMLTRCLGLPQSPQVDIFDIPIQNKYYIMLCSDGLSDVLTNQAIGEILGQESKLEDKLTKLVETAYDGGSTDNITVILVDLLAHGEEEDQSEWEQD

SEQ ID NO: 4767 - DNA, 1407 bp, Alloiococcus otitidis
  CDS (28)..(1404)
aagaagggatggaatttggccaaaccaatgaaagaagatgacccaagacaagtggcctgccaggttttagagaaagtcgaccaagaagcaggttacgccaacctggaagtaaatgcgagactggacaagatgaatgccagccaggaagataagaacttaatgactgccttagtttacggagtcctccaacaccaatacctcttggatttttatttagaaccctatattaaaaagcctaaaaagctccaggcttgggtccggcaagtcctccgcctagccgtttaccagctggtatttttagaccatattcctgactatgcagctatcaacgaagcagttcagtatgccaaaaaaagaggccacaagggggtgtctggcctggtcaatggagttttacggaacttcctccgccacgacttgaggaacccaaaagacctagcagacccagtagaccgaataagggtcagttatagcctgcccaagtggttggttgacaaattgattacccaatacggtcaaaagaccgctatagacatggcagcctcttataataaaccggccaagttaagcctgcgagttaacttggacaaggtcagccgggaagaggcctgtacccaacttgaagcgagtggttaccaggttcaaaagagtgacctggctccttgtggccttattgtggcagggggcttgcctaccagccacccgctctaccaggcaggagctatccgaatccaagatgagtcggcaatgctggtgggcctagccttggatttaaagagccattataaggtggctgacttgtgtgctggacccggaggcaaatcaggccatatcgcttcttatctcgaagctgaagctgggggtcaactttatgcctcagatatttatgaccacaagctggacttaattgaagacagcctagaaagtcaaggctatgctagcttggcccaagtcaaaaagctggatgggcgtatagctggtcaggtatatccagacaactactttgaccggatcctaattgatgccccttgctccggaatgggcctgttgcgtaggaaaccggacatgcgctacagcaaggatgtagccagcctgactgccttgcctgagcttcaattggctattttaaatgcagccggtcccttgttgaaagaaggaggtaagatggtttatgccacctgtaccatcttgcaagaggaaaaccaggcagtcattcaagcttttttaaaggaaaatcccgaatttttcttggaaaaaattccttttgaccaaagccagtacctagataatgaaggccaggtgactattttgcctagtgactttgactcagacggcttttacctggctcgtttggtaaaaagaaaagaggcaagtggaagtaggcagagagaaaatgaaaagaggtga

SEQ ID NO: 4768 - protein, 459 aa, Alloiococcus otitidis
MKEDDPRQVACQVLEKVDQEAGYANLEVNARLDKMNASQEDKNLMTALVYGVLQHQYLLDFYLEPYIKKPKKLQAWVRQVLRLAVYQLVFLDHIPDYAAINEAVQYAKKRGHKGVSGLVNGVLRNFLRHDLRNPKDLADPVDRIRVSYSLPKWLVDKLITQYGQKTAIDMAASYNKPAKLSLRVNLDKVSREEACTQLEASGYQVQKSDLAPCGLIVAGGLPTSHPLYQAGAIRIQDESAMLVGLALDLKSHYKVADLCAGPGGKSGHIASYLEAEAGGQLYASDIYDHKLDLIEDSLESQGYASLAQVKKLDGRIAGQVYPDNYFDRILIDAPCSGMGLLRRKPDMRYSKDVASLTALPELQLAILNAAGPLLKEGGKMVYATCTILQEENQAVIQAFLKENPEFFLEKIPFDQSQYLDNEGQVTILPSDFDSDGFYLARLVKRKEASGSRQRENEKR

SEQ ID NO: 4769 - DNA, 1407 bp, Alloiococcus otitidis; identical to SEQ ID NO: 4767
  CDS (16)..(1404)

SEQ ID NO: 4770 - protein, 463 aa, Alloiococcus otitidis
MAKPMKEDDPRQVACQVLEKVDQEAGYANLEVNARLDKMNASQEDKNLMTALVYGVLQHQYLLDFYLEPYIKKPKKLQAWVRQVLRLAVYQLVFLDHIPDYAAINEAVQYAKKRGHKGVSGLVNGVLRNFLRHDLRNPKDLADPVDRIRVSYSLPKWLVDKLITQYGQKTAIDMAASYNKPAKLSLRVNLDKVSREEACTQLEASGYQVQKSDLAPCGLIVAGGLPTSHPLYQAGAIRIQDESAMLVGLALDLKSHYKVADLCAGPGGKSGHIASYLEAEAGGQLYASDIYDHKLDLIEDSLESQGYASLAQVKKLDGRIAGQVYPDNYFDRILIDAPCSGMGLLRRKPDMRYSKDVASLTALPELQLAILNAAGPLLKEGGKMVYATCTILQEENQAVIQAFLKENPEFFLEKIPFDQSQYLDNEGQVTILPSDFDSDGFYLARLVKRKEASGSRQRENEKR

SEQ ID NO: 4771 - DNA, 981 bp, Alloiococcus otitidis
  CDS (436)..(978)
actttatttaaggatgtgactgacttgtaccgagttgtttttatggggacaccccaattcgctgttccgattttggagggtctcctagccaatgaatccctagaagtagttgctgtcgtgacccaacccgaccggaaagttggtcgcaaaggaaacatcaccccgccgccggtcaaaagactagcccaagaccaggctatcccagtccttcagcctgagcgactaaaagggtcagaccaggaaaaagacttactaaaacttgcacccgacttgattgtgacagctgcttttggccagtacttaccgcaagagatcttggacttgccaaagtttgccagtatcaatgtccacgcctccctccttcctcgctacaggggggctgcccccatccattatgccctatggaatggggaccaggagactggggtgaccattatgcatatgacccaagaaatcgatgctggcaatatcattagccaggcaaaattaaagattgaaccagaggatgataccgggatcttgtttgaaaaattaagctatctcggccgggacttgttagaagacacattggtcaagatttttaaaggggaaggacagggggtcaaacaagaccccagccaagtcacttatgcccctatgattagccgggaccaggaggaaatctcttggcaagagccagctcaagacctctacaataagatccgggcctttagaccctttcctggaacttacacctggtttgagggcgaccggttcaaaatttgggattctcatctggttgaccagaaaacggacaaaaagcctggtcaaatcgtggaagctagtaaaaaacaactcctggttgcttgcgggaaccagacaattttagccttagaccaggtccaacctgctggtaagagtcagatgcccgttaagagttacttggctggagcaaaattagaagaagggatggaatttggccaaaccaatgaaagaagatga

SEQ ID NO: 4772 - protein, 181 aa, Alloiococcus otitidis
MHMTQEIDAGNIISQAKLKIEPEDDTGILFEKLSYLGRDLLEDTLVKIFKGEGQGVKQDPSQVTYAPMISRDQEEISWQEPAQDLYNKIRAFRPFPGTYTWFEGDRFKIWDSHLVDQKTDKKPGQIVEASKKQLLVACGNQTILALDQVQPAGKSQMPVKSYLAGAKLEEGMEFGQTNERR

SEQ ID NO: 4773 - DNA, 981 bp, Alloiococcus otitidis; identical to SEQ ID NO: 4771
  CDS (43)..(978)

SEQ ID NO: 4774 - protein, 312 aa, Alloiococcus otitidis
MGTPQFAVPILEGLLANESLEVVAVVTQPDRKVGRKGNITPPPVKRLAQDQAIPVLQPERLKGSDQEKDLLKLAPDLIVTAAFGQYLPQEILDLPKFASINVHASLLPRYRGAAPIHYALWNGDQETGVTIMHMTQEIDAGNIISQAKLKIEPEDDTGILFEKLSYLGRDLLEDTLVKIFKGEGQGVKQDPSQVTYAPMISRDQEEISWQEPAQDLYNKIRAFRPFPGTYTWFEGDRFKIWDSHLVDQKTDKKPGQIVEASKKQLLVACGNQTILALDQVQPAGKSQMPVKSYLAGAKLEEGMEFGQTNERR

SEQ ID NO: 4775 - DNA, 981 bp, Alloiococcus otitidis; identical to SEQ ID NO: 4771
  CDS (25)..(978)

SEQ ID NO: 4776 - protein, 318 aa, Alloiococcus otitidis
MYRVVFMGTPQFAVPILEGLLANESLEVVAVVTQPDRKVGRKGNITPPPVKRLAQDQAIPVLQPERLKGSDQEKDLLKLAPDLIVTAAFGQYLPQEILDLPKFASINVHASLLPRYRGAAPIHYALWNGDQETGVTIMHMTQEIDAGNIISQAKLKIEPEDDTGILFEKLSYLGRDLLEDTLVKIFKGEGQGVKQDPSQVTYAPMISRDQEEISWQEPAQDLYNKIRAFRPFPGTYTWFEGDRFKIWDSHLVDQKTDKKPGQIVEASKKQLLVACGNQTILALDQVQPAGKSQMPVKSYLAGAKLEEGMEFGQTNERR

SEQ ID NO: 4777 - DNA, 981 bp, Alloiococcus otitidis; identical to SEQ ID NO: 4771
  CDS (16)..(978)

SEQ ID NO: 4778 - protein, 321 aa, Alloiococcus otitidis
MTDLYRVVFMGTPQFAVPILEGLLANESLEVVAVVTQPDRKVGRKGNITPPPVKRLAQDQAIPVLQPERLKGSDQEKDLLKLAPDLIVTAAFGQYLPQEILDLPKFASINVHASLLPRYRGAAPIHYALWNGDQETGVTIMHMTQEIDAGNIISQAKLKIEPEDDTGILFEKLSYLGRDLLEDTLVKIFKGEGQGVKQDPSQVTYAPMISRDQEEISWQEPAQDLYNKIRAFRPFPGTYTWFEGDRFKIWDSHLVDQKTDKKPGQIVEASKKQLLVACGNQTILALDQVQPAGKSQMPVKSYLAGAKLEEGMEFGQTNERR

SEQ ID NO: 4779 - DNA, 2427 bp, Alloiococcus otitidis
  CDS (1)..(2424)
atgaccgacctagcagaagtaattgtggacgttccggtgatgcagaccaaccatccttatacctaccgggttccccaagaccttgaagccaatattgagccgggcatgcgggtggtggtcccctttggtaagggggaccgactagtccaagcttttgtcgtctccctgttaagtgatcaggctgacttggacctagatccgggccaagatcttaaagacattgcttcagttatggattttaagccccttttaaatgaagaactcttgcaattgggccaatatatgagtcaaaccacctatagcttccagattaactgctaccaaactatgctgcctgctgtttaccgagcccggtataataaacggatccagctcctagacactgaagatgacaacttgctttacgaccttttccaaggaaaggaaagcatagactggcaggaagctgaagaccgggggatcctatcccacttaatgaatctagaaaaagaaggacaagtggcagtccactacctagtgacggataagcaaaacaagaaaaaggaaaagtatatcaaggcatgcttgtctccggatgcctatcagaacattctagcagacttgccaagcaatgcttaccgccaagcagagctcttaaagcttttggctgaccaccctgaccccctcaactggcaggaagtgcggaaaaaacacaaattaaccaacgcccaggtcaagacaggccaagaccggggctggctggaagtgacctataaagaagtcttccgcgaccctctcaaaggtagggaaataaaagagtccaagcccttgcccttaactgaagaacaagcgactgcctttgaagccattaaccaaagcattcaagaccactcccatgaagttttcttactggaaggggtgactgggtccggtaagaccgagatttacttgcaaaccattcatgaagttgttcaaaaaggcaggggagccatcgttttagtgcctgaaatttcccttaccccccagatggtagaacgatttaaaagtcgctttggggaccaggtcgccatcctccactctggcttgtcagacaatgaaaaatatgacgaatggcgccggattgaacaagggtcagccaagattgtggtcggggcccggtccagtatttttgcccccatcaaggacttgggaattattatcatagatgaagaacacgaatctacctataagcaggaagagaccccccgctatcatgcccgagacattgccatttggcgcggaaaataccatcaagcccctgtggtcttaggtagtgctacaccgagcttggaatcccgggctcgaaccttaaagaatgtttacaccctattaagcctaaccaagcgggccaatgcccagcccttgcctgacattgatattgtagacatgagacaagaagtcagccagggtaaccggtcttctttttccttgaacttacaggagaaaatcaaagaccggttagccaaaaagcaacaagtggtcctcttgctcaaccggcggggcttttcatcctttgtcatgtgccgggactgtggctttgtcttagagtgccctaattgcgacatttcccagactctccacatggataccaaaaccatgaagtgccactattgcggtcatgaagaagccattccccaccactgtccagaatgtggtagccggtccatccgctattacggaactggaacgcaaaaaatagaagatgaattaggccaagtcttcccaaaagcccggatcattcggatggatgtggacaccacgcgtaaaaaaggggcccatgagagactcttggctaagttcagaaatcaagaagcagacatcctactgggcacccagatgattgccaagggattggactttccgaatgtcagcctggttggggtgattaatgccgatacagccttgtccctaccagactttcgggcacctgagtccacttttgacctcttaacccaggtctcaggccgggcagggcgaggccaggtgactggccaggtggttatccagtcttacaacccagaccactatgccatccagttagccaaaaaccatgattatgaaagtttcttcaaaaaggagatggtcttacgcaaggccagccagtacccgcctttctacttcttggtccggattacggttagccatgaaaatgaagctatggcaagcaagaccatgggccaaattgttcattttatcaaaccagctttaagcgaccaggctattgtcctaggccctacaccaagatcgattgcccggacccataaccgctaccacttccagactatcattaaatacaagcatgaagaccggatgcaaaaccgcttgcaccagcttttgaaagctagccaaaagcaagtggctcagggcttgtttatttcaatcgaccccaaacccatgaactttatttaa

SEQ ID NO: 4780 - protein, 808 aa, Alloiococcus otitidis
MTDLAEVIVDVPVMQTNHPYTYRVPQDLEANIEPGMRVVVPFGKGDRLVQAFVVSLLSDQADLDLDPGQDLKDIASVMDFKPLLNEELLQLGQYMSQTTYSFQINCYQTMLPAVYRARYNKRIQLLDTEDDNLLYDLFQGKESIDWQEAEDRGILSHLMNLEKEGQVAVHYLVTDKQNKKKEKYIKACLSPDAYQNILADLPSNAYRQAELLKLLADHPDPLNWQEVRKKHKLTNAQVKTGQDRGWLEVTYKEVFRDPLKGREIKESKPLPLTEEQATAFEAINQSIQDHSHEVFLLEGVTGSGKTEIYLQTIHEVVQKGRGAIVLVPEISLTPQMVERFKSRFGDQVAILHSGLSDNEKYDEWRRIEQGSAKIVVGARSSIFAPIKDLGIIIIDEEHESTYKQEETPRYHARDIAIWRGKYHQAPVVLGSATPSLESRARTLKNVYTLLSLTKRANAQPLPDIDIVDMRQEVSQGNRSSFSLNLQEKIKDRLAKKQQVVLLLNRRGFSSFVMCRDCGFVLECPNCDISQTLHMDTKTMKCHYCGHEEAIPHHCPECGSRSIRYYGTGTQKIEDELGQVFPKARIIRMDVDTTRKKGAHERLLAKFRNQEADILLGTQMIAKGLDFPNVSLVGVINADTALSLPDFRAPESTFDLLTQVSGRAGRGQVTGQVVIQSYNPDHYAIQLAKNHDYESFFKKEMVLRKASQYPPFYFLVRITVSHENEAMASKTMGQIVHFIKPALSDQAIVLGPTPRSIARTHNRYHFQTIIKYKHEDRMQNRLHQLLKASQKQVAQGLFISIDPKPMNFI

SEQ ID NO: 4781 - DNA, 1212 bp, Alloiococcus otitidis
  CDS (7)..(1209)
acaaagatgctgaaaaataaaaagatagccttatatgttactggtggtatagcagtatacaaatcactttacttacttagggaaatcatcaaacaaggcggggaggtccgggttgccatgactcaagcagcttgtcaatttgttaaccccttatcttttcaggttttaagccaaaaaaaggttcagattgacacttttgaagaaggtcagcccgaatcggtcagtcacattgatttgacggattgggccgactactccatcgtggctccggcaactgccaatatcatcggcaagctggccaatgggattggggacgattttgtttcaacagccttgttggcaacggaccaccccatttttttagtcccagccatgaacaccaagatgtatgaaaatcccgctcttaagaaaaacaaggccttccttattgaacagggccattactggatggagccggatattggatttttagcagagggctacgaaggcttgggtcgttttccagacctagaccggattatggcggaatttaaccattttattattgctaggaatccaggtatcctatcaggaaaaaaagtcctcgtcacagcaggtgggacggtggagcggattgatcccgtccggtatatttccaatgattcttctggtaagatgggccaccaacttgctcaagcggcctatgaagctggggcccaggttagcttggtaacagccagtgacttgccgaccagtccctttattgaccgctttcaggtggagtccaccttagacttgtaccaaacagttagtgacctctatgaccaccatgacattctcatgatggccgcagcggtgtctgactaccggccagtcaaccggtcagacaaaaagatgaaaaagcaagataatttaaccattgaactggaaaaaaatcctgatattttggccgaaatgggccggcggaaagaccaacaaatcaatgtcggctttgcagcagaaacccataaccttgaagaatatgcccaaaaaaaattagcctccaaacaagctgacttgatcgtagccaatgaagtgggccggggagaccggggctttaatgcggatgaaaatgcggcccttgttttttccagtgaccaagatccgcttgagcttccccttcagtctaaaaaagatatggcaaaaaagattattgaagtggtggccagtaaattgcctgcttctcccaaataa

SEQ ID NO: 4782 - protein, 401 aa, Alloiococcus otitidis
MLKNKKIALYVTGGIAVYKSLYLLREIIKQGGEVRVAMTQAACQFVNPLSFQVLSQKKVQIDTFEEGQPESVSHIDLTDWADYSIVAPATANIIGKLANGIGDDFVSTALLATDHPIFLVPAMNTKMYENPALKKNKAFLIEQGHYWMEPDIGFLAEGYEGLGRFPDLDRIMAEFNHFIIARNPGILSGKKVLVTAGGTVERIDPVRYISNDSSGKMGHQLAQAAYEAGAQVSLVTASDLPTSPFIDRFQVESTLDLYQTVSDLYDHHDILMMAAAVSDYRPVNRSDKKMKKQDNLTIELEKNPDILAEMGRRKDQQINVGFAAETHNLEEYAQKKLASKQADLIVANEVGRGDRGFNADENAALVFSSDQDPLELPLQSKKDMAKKIIEVVASKLPASPK

SEQ ID NO: 4783 - DNA, 237 bp, Alloiococcus otitidis
  CDS (13)..(234)
ggagatggaataatgttattagaaccttcattagaccgcttgatggaccggattgattctcagtattctctggtcatgctagcagccaaacgggcccaccagttagatgaagcggaagacttggctgatgagcgcttacttgaccactacaagtctgaacggaatatcggcaaggccctggaagaaatagagtcaggtgatcttgtgattgactcaagcaagttaaaaggcgaataa

SEQ ID NO: 4784 - protein, 74 aa, Alloiococcus otitidis
MLLEPSLDRLMDRIDSQYSLVMLAAKRAHQLDEAEDLADERLLDHYKSERNIGKALEEIESGDLVIDSSKLKGE

SEQ ID NO: 4785 - DNA, 684 bp, Alloiococcus otitidis
  CDS (178)..(681)
tacaagaatcctaaatttatgttacacttgtcaataagtagtttgtattgtgaaaggaaatgtactgtggaaagaggtttactcattgtcctatccggtccctcaggcgttggcaagggtacggtaaggaagcacttattcgagcattacaataatgattttgattactccatttcgatgaccacccggaaacagagggctggggaaaaagaaggagtggactattattttcggactcgggaagaatttgaagacctgattgaaaataatggtctcctagagtatgctgaatacgttggcaattattacggtacacctttacaatacgtccaagaaactcttgattccggccgggatgtttttttggagattgaggtccagggtgccttaaaggttaggaagcagatgaaagaggatggtatctttatctttctttcaccgccggaccttggagaactggaaagccggctaatcggtcgaggaaccgatagcgttgaaatgatccaaaaaagaattcaaaaggctgttcaggaacttaagttaatccaatattatgattatgttgtcgaaaacaatagtgtggaccaggcagcccaaaaagtccgtcacatcattgaaagtgagcacttgaaagtccaccgcaatcttagacactttacagaaattattgaggagatggaataa

SEQ ID NO: 4786 - protein, 168 aa, Alloiococcus otitidis
MTTRKQRAGEKEGVDYYFRTREEFEDLIENNGLLEYAEYVGNYYGTPLQYVQETLDSGRDVFLEIEVQGALKVRKQMKEDGIFIFLSPPDLGELESRLIGRGTDSVEMIQKRIQKAVQELKLIQYYDYVVENNSVDQAAQKVRHIIESEHLKVHRNLRHFTEIIEEME

SEQ ID NO: 4787 - DNA, 684 bp, Alloiococcus otitidis; identical to SEQ ID NO: 4785
  CDS (19)..(681)

SEQ ID NO: 4788 - protein, 221 aa, Alloiococcus otitidis
MLHLSISSLYCERKCTVERGLLIVLSGPSGVGKGTVRKHLFEHYNNDFDYSISMTTRKQRAGEKEGVDYYFRTREEFEDLIENNGLLEYAEYVGNYYGTPLQYVQETLDSGRDVFLEIEVQGALKVRKQMKEDGIFIFLSPPDLGELESRLIGRGTDSVEMIQKRIQKAVQELKLIQYYDYVVENNSVDQAAQKVRHIIESEHLKVHRNLRHFTEIIEEME

SEQ ID NO: 4789 - DNA, 1356 bp, Alloiococcus otitidis
  CDS (4)..(1353)
gttatggataaaaagaaggaagaaggcaaaaaactagccttagttttagcaggtggcggaagtcggggagcctaccaaataggcgtttggaaggccatgcgcaagcttggcttatcaattgacttggtgactggaatatcagttggggctttaaacggggcctttgtcatgcaagattatttcgaccaagcggagaagatgtggtcgaccatttccacaccagacgttattgactatgaccctaaaagttcagaggactttacagattataccaggaacttaatttccctagcggtcaaggccttcagccaaggaggaatcaagaccggtcctttgcgtcgcttgattgacaattacctgatggaccaagaccaactggaccaattgccggttcaatttggtttggtggtgaccaatgatgagacaaaagaaagagaagaatactttgtgaataaccgaccgcgccaggaaatttgcgacctcctgatggcttcggcctccctctttcccctcctggaaaaaactagaattggacaggaagactatattgacggggggtaccgcaaccatattcccctttccctagcccagagtcaagaccctgacattattgtcgttgtcgacatctttccagaaaagaaagcggaattagagggtaggctagacaatgtcctccttgtcagaccgacctggccattaggagatatgttgatttttgactggaggcggagccaacgcaatattagactaggctataatgattttatgaaggcttgtggtcattactacggctattattacagtttttacgaccaggggatcttcctcaagcaaaacttggttaatatactagtcgctgccagaaagcaggagggaagccgggcccaactcctcctagctatcctaaaaaatgctcgaaaaatccaaaaacaagttgagtccaagtgggattggaagataggaaggaacaattaccacctagccctactagaagtttgcggtaaactattctctctacctccagagccggtttatacagtcaaaggctttatccaagtattggtcagccgaattaagcaagtccaacaaatggacaaggataatataagccaaatctacatgccaaactaccaattgagctaccaagagtggctgacttatttttaccaacgcctggctcccttgccagaccaagaccggattttgaccttggttgagcaatttaagcaaggggattgggccttagacagcctggccaaccgcctgtttttccaagtagacccgactagttttgcccttgctgtctttatttatgaactaatggaaaatgaaagaaatctaatacaagaatcctaa

SEQ ID NO: 4790 - protein, 450 aa, Alloiococcus otitidis
MDKKKEEGKKLALVLAGGGSRGAYQIGVWKAMRKLGLSIDLVTGISVGALNGAFVMQDYFDQAEKMWSTISTPDVIDYDPKSSEDFTDYTRNLISLAVKAFSQGGIKTGPLRRLIDNYLMDQDQLDQLPVQFGLVVTNDETKEREEYFVNNRPRQEICDLLMASASLFPLLEKTRIGQEDYIDGGYRNHIPLSLAQSQDPDIIVVVDIFPEKKAELEGRLDNVLLVRPTWPLGDMLIFDWRRSQRNIRLGYNDFMKACGHYYGYYYSFYDQGIFLKQNLVNILVAARKQEGSRAQLLLAILKNARKIQKQVESKWDWKIGRNNYHLALLEVCGKLFSLPPEPVYTVKGFIQVLVSRIKQVQQMDKDNISQIYMPNYQLSYQEWLTYFYQRLAPLPDQDRILTLVEQFKQGDWALDSLANRLFFQVDPTSFALAVFIYELMENERNLIQES

SEQ ID NO: 4791 - DNA, 669 bp, Alloiococcus otitidis
  CDS (1)..(666)
atggctgatttactgaatgtcaaccccacccggatggaattgtccaacttgaaagaccggcttgagctagctagtcggggttataaactcctcaaagacaagcaagatgaactcatgcggcaattcattgagctcgttcgaaaaaacgaccaattgcgcaaggaagtagaagacgatctggaagaagggatgaaatccttctctgtcgctaagtcactcttgcatgaaaattacttggaagaaattatggccattccttcacggtcggtggagatgaacattaaccgaaaaaatattatgtcagttcaagttccgcaaatgaactttgactaccataataaatctcaagaagacgagccactcaagtatggttatctcaactccaacagtgaattggatgctacctttgaacagttcaataacgtcatgtccaagatgctggacctagctgaaatcgaaaaaacttgccaactgatggcaagtgaaatcgaaaaaacgcgacgtcgggttaatgccttggaacacttgaccatccctcagttagaaaatactatttactttattcagatgaagctggatgaaagtgaacgggctgaaattacccgcttaatgaaaattaaggatatgggccaagccgaagaagaccaagaagctgaggaaaaagaataa

SEQ ID NO: 4792 - protein, 222 aa, Alloiococcus otitidis
MADLLNVNPTRMELSNLKDRLELASRGYKLLKDKQDELMRQFIELVRKNDQLRKEVEDDLEEGMKSFSVAKSLLHENYLEEIMAIPSRSVEMNINRKNIMSVQVPQMNFDYHNKSQEDEPLKYGYLNSNSELDATFEQFNNVMSKMLDLAEIEKTCQLMASEIEKTRRRVNALEHLTIPQLENTIYFIQMKLDESERAEITRLMKIKDMGQAEEDQEAEEKE

SEQ ID NO: 4793 - DNA, 1413 bp, Alloiococcus otitidis
  CDS (34)..(1410)
aatcacttgttgaaaaaggtggtgttgactccaatgcttaaagagtataaaacagtctcagatgttgttggtcccttgatgacagttgaaggcgttgagggagttaaatttgatgagctggtagatatcgagctccaagatgggtccagacgacggggccaagtcctggagatagatggtgaccgggcagtcgttcaaatttttgagggctcttcagggattaacctaccagaaaccaaggtccgctttttaggcaagcccttgtccctggatgtttccgaagatatgattggccggatttttgatggcatgggccaaattaatgatgggggaccagaattaatcccagaaaaatccatggatattaacggccaggccatcaacccagtagcccgtaactatcctgatgaatttatccaaacaggtatctcaaccatcgaccacctaaacaccctggttcgaggccaaaaattaccggttttctctgcatccggactccctcacgaagagttagcggcccaaattgcccgccaagctcaggttgtgggaacggatgaagagttcgcggttgtctttgcggccgttgggatcacttatgaagaagctgaattctttatgaatgacttcagagaaacaggggcgatcgaccggtctgttgttttcattaacctagccgatgacccggcaattgaacggattgcgacccctcggatggccttaactgcagcggaatacttggcctttgaaaaggacatgcacgttttaatcattacaacagacatgaccaactatgccaacgccttgcgtgaggtttcagccgctagacgtgaggtccctggccgtcgtggttacccaggctacctctacaccaacttggcttccctatatgaacgggcaggtcgtttggaaggagctaaggggtctgtcactcaaatccctgtcttgaccatgcctgaagaggatattacccaccctatccctgacttgaccggttatattaccgaggggcaaattatcctctctcgtgagctagaaaaccaaggaattgagcctccgattgacgtcctcccttccttgtctcggttgaaagatgaggggattggtgaaggcaagacaagagaagaccatgccccaaccatgaaccaaatcttctctgcctacgcacaagggaaagatgctaaggagttggccaatgtcttgggtgactcagccttgtcagaatcagacaagaaatatgttgaatttactgaccgctttgaacaagagtatgtcaaccaagggaactatactgaccgggccatcgaagaatccttagacttaggctgggacttgctcaaaatcttgcctcgtgaagaattgaaacggattaaagatgacttactagacaagtacttgcctaaggaagaagggtga

SEQ ID NO: 4794 - protein, 459 aa, Alloiococcus otitidis
MLKEYKTVSDVVGPLMTVEGVEGVKFDELVDIELQDGSRRRGQVLEIDGDRAVVQIFEGSSGINLPETKVRFLGKPLSLDVSEDMIGRIFDGMGQINDGGPELIPEKSMDINGQAINPVARNYPDEFIQTGISTIDHLNTLVRGQKLPVFSASGLPHEELAAQIARQAQVVGTDEEFAVVFAAVGITYEEAEFFMNDFRETGAIDRSVVFINLADDPAIERIATPRMALTAAEYLAFEKDMHVLIITTDMTNYANALREVSAARREVPGRRGYPGYLYTNLASLYERAGRLEGAKGSVTQIPVLTMPEEDITHPIPDLTGYITEGQIILSRELENQGIEPPIDVLPSLSRLKDEGIGEGKTREDHAPTMNQIFSAYAQGKDAKELANVLGDSALSESDKKYVEFTDRFEQEYVNQGNYTDRAIEESLDLGWDLLKILPREELKRIKDDLLDKYLPKEEG

SEQ ID NO: 4795 - DNA, 1413 bp, Alloiococcus otitidis; identical to SEQ ID NO: 4793
  CDS (19)..(1410)

SEQ ID NO: 4796 - protein, 464 aa, Alloiococcus otitidis
MVLTPMLKEYKTVSDVVGPLMTVEGVEGVKFDELVDIELQDGSRRRGQVLEIDGDRAVVQIFEGSSGINLPETKVRFLGKPLSLDVSEDMIGRIFDGMGQINDGGPELIPEKSMDINGQAINPVARNYPDEFIQTGISTIDHLNTLVRGQKLPVFSASGLPHEELAAQIARQAQVVGTDEEFAVVFAAVGITYEEAEFFMNDFRETGAIDRSVVFINLADDPAIERIATPRMALTAAEYLAFEKDMHVLIITTDMTNYANALREVSAARREVPGRRGYPGYLYTNLASLYERAGRLEGAKGSVTQIPVLTMPEEDITHPIPDLTGYITEGQIILSRELENQGIEPPIDVLPSLSRLKDEGIGEGKTREDHAPTMNQIFSAYAQGKDAKELANVLGDSALSESDKKYVEFTDRFEQEYVNQGNYTDRAIEESLDLGWDLLKILPREELKRIKDDLLDKYLPKEEG

SEQ ID NO: 4797 - DNA, 1413 bp, Alloiococcus otitidis; identical to SEQ ID NO: 4793
  CDS (7)..(1410)

SEQ ID NO: 4798 - protein, 468 aa, Alloiococcus otitidis
MLKKVVLTPMLKEYKTVSDVVGPLMTVEGVEGVKFDELVDIELQDGSRRRGQVLEIDGDRAVVQIFEGSSGINLPETKVRFLGKPLSLDVSEDMIGRIFDGMGQINDGGPELIPEKSMDINGQAINPVARNYPDEFIQTGISTIDHLNTLVRGQKLPVFSASGLPHEELAAQIARQAQVVGTDEEFAVVFAAVGITYEEAEFFMNDFRETGAIDRSVVFINLADDPAIERIATPRMALTAAEYLAFEKDMHVLIITTDMTNYANALREVSAARREVPGRRGYPGYLYTNLASLYERAGRLEGAKGSVTQIPVLTMPEEDITHPIPDLTGYITEGQIILSRELENQGIEPPIDVLPSLSRLKDEGIGEGKTREDHAPTMNQIFSAYAQGKDAKELANVLGDSALSESDKKYVEFTDRFEQEYVNQGNYTDRAIEESLDLGWDLLKILPREELKRIKDDLLDKYLPKEEG

SEQ ID NO: 4799 - DNA, 1857 bp, Alloiococcus otitidis
  CDS (124)..(1854)
ggagatcacggatcgagaagaacgtcgaaaaagctgtgggtcaaaacatactttaggagggtgatggatttgagtaaaggtacgattgttagtgtctcaggtcctttagtaacagctaaaggaatggaagaagcagatattcaagatatttgccgtgtcggtgaattcggattgatcggcgaggtaattgacatgagaggcgacgtcgcttccatccaggtatatgaagaaacttccatggttggacctggagaagatgttgtcatcactggtgaacccttgtcagttgaattagcaccgggcatgatttcgcaaatgtttgatgggattcaacgtcccttaaaatcattcgttgaaaaaacagaaagtagtttcctacaacgcggggtagaggtgcaagccttagaccgcgataaaaaatgggaatttgaagccaaggtccagccaggggaccaagtcgaaactggcgacattattggggttgtccaagaatctgctgttattgaacaccggattttggtcccacatggcatcaatggcaaagtgagctcggtcgagtctggtgaatatacaattgaagacgacttgtacaccattgaaacagaggatggcgaaaaaaccttcaatatgattcaaaaatggcctgttcgtcaaggccgtccagtggctcagaaattaaacccgattcaacctttaattactggccaaagagttattgacaccttgttcccagtagcaaaaggtggggcggcaaccgttccaggtcctttcggtgctggtaaaacggttgtccaacaccaaattgctaaattcgccgacgtcgacttagttgtctacattggttgtggtgaacgaggtaacgagatgaccgaggttattaacgagttccctgaattgactgacccagaaactggtaagtctattatggagcgaaccatcttgatcgccaacacctctaacatgccagtggcagcccgggaagcatctatttacactggtattaccattgctgaatattaccgggacatgggctactccgtggctgtcatggctgactccacctctcgttgggccgaagccttgcgtgagatgtccggtcgtttggaagagatgcctggggatgaagggtaccctgcctaccttggatcccgaattgctgagtactatgaacgggcgggtatggtccaacctcttggcagtgatgaagaacgtcgcggtagcattacagccattggagccgtttcgcctccaggtggggatacttctgaaccggttacccaaaacactcttcgtgtggcgaaggtctattgggcgcttgactcttccctatctcaaagacggcacttccctgccatcaactggctagattcctactccttgtattctgaccgcttgaacaaatatatcggggaagacaatgacttagactggaatgacattgtcaaacgtgcccgggtcattttacaagaagagtctgaattagaagaaattgtccgtttggttggggtggattccctatccgaatctgaccgaatcaccatgcttgtagcttccatgattcgtgaagactacctccaacaaaacgcttatgatgatgtggatgcttacactccgctatccaagcaattaaaaatgatgcagattatcatggacttcgaaagccaggcaagagaagcgcttgacgtaggttcttactatgatgaaatagccaaggggactggtgaagtcagagaaaaaattggtcggatgaaatatattgaagctgacgatatggacagctttgacgaaatccacaattctttggaagatgttatgaaatcacttgttgaaaaaggtggtgttgactccaatgcttaa

SEQ ID NO: 4800 - protein, 577 aa, Alloiococcus otitidis
MEEADIQDICRVGEFGLIGEVIDMRGDVASIQVYEETSMVGPGEDVVITGEPLSVELAPGMISQMFDGIQRPLKSFVEKTESSFLQRGVEVQALDRDKKWEFEAKVQPGDQVETGDIIGVVQESAVIEHRILVPHGINGKVSSVESGEYTIEDDLYTIETEDGEKTFNMIQKWPVRQGRPVAQKLNPIQPLITGQRVIDTLFPVAKGGAATVPGPFGAGKTVVQHQIAKFADVDLVVYIGCGERGNEMTEVINEFPELTDPETGKSIMERTILIANTSNMPVAAREASIYTGITIAEYYRDMGYSVAVMADSTSRWAEALREMSGRLEEMPGDEGYPAYLGSRIAEYYERAGMVQPLGSDEERRGSITAIGAVSPPGGDTSEPVTQNTLRVAKVYWALDSSLSQRRHFPAINWLDSYSLYSDRLNKYIGEDNDLDWNDIVKRARVILQEESELEEIVRLVGVDSLSESDRITMLVASMIREDYLQQNAYDDVDAYTPLSKQLKMMQIIMDFESQAREALDVGSYYDEIAKGTGEVREKIGRMKYIEADDMDSFDEIHNSLEDVMKSLVEKGGVDSNA

SEQ ID NO: 4801 - DNA, 1857 bp, Alloiococcus otitidis; identical to SEQ ID NO: 4799
  CDS (64)..(1854)

SEQ ID NO: 4802 - protein, 597 aa, Alloiococcus otitidis
MDLSKGTIVSVSGPLVTAKGMEEADIQDICRVGEFGLIGEVIDMRGDVASIQVYEETSMVGPGEDVVITGEPLSVELAPGMISQMFDGIQRPLKSFVEKTESSFLQRGVEVQALDRDKKWEFEAKVQPGDQVETGDIIGVVQESAVIEHRILVPHGINGKVSSVESGEYTIEDDLYTIETEDGEKTFNMIQKWPVRQGRPVAQKLNPIQPLITGQRVIDTLFPVAKGGAATVPGPFGAGKTVVQHQIAKFADVDLVVYIGCGERGNEMTEVINEFPELTDPETGKSIMERTILIANTSNMPVAAREASIYTGITIAEYYRDMGYSVAVMADSTSRWAEALREMSGRLEEMPGDEGYPAYLGSRIAEYYERAGMVQPLGSDEERRGSITAIGAVSPPGGDTSEPVTQNTLRVAKVYWALDSSLSQRRHFPAINWLDSYSLYSDRLNKYIGEDNDLDWNDIVKRARVILQEESELEEIVRLVGVDSLSESDRITMLVASMIREDYLQQNAYDDVDAYTPLSKQLKMMQIIMDFESQAREALDVGSYYDEIAKGTGEVREKIGRMKYIEADDMDSFDEIHNSLEDVMKSLVEKGGVDSNA

SEQ ID NO: 4803 - DNA, 1857 bp, Alloiococcus otitidis; identical to SEQ ID NO: 4799
  CDS (61)..(1854)

SEQ ID NO: 4804 - protein, 598 aa, Alloiococcus otitidis
MMDLSKGTIVSVSGPLVTAKGMEEADIQDICRVGEFGLIGEVIDMRGDVASIQVYEETSMVGPGEDVVITGEPLSVELAPGMISQMFDGIQRPLKSFVEKTESSFLQRGVEVQALDRDKKWEFEAKVQPGDQVETGDIIGVVQESAVIEHRILVPHGINGKVSSVESGEYTIEDDLYTIETEDGEKTFNMIQKWPVRQGRPVAQKLNPIQPLITGQRVIDTLFPVAKGGAATVPGPFGAGKTVVQHQIAKFADVDLVVYIGCGERGNEMTEVINEFPELTDPETGKSIMERTILIANTSNMPVAAREASIYTGITIAEYYRDMGYSVAVMADSTSRWAEALREMSGRLEEMPGDEGYPAYLGSRIAEYYERAGMVQPLGSDEERRGSITAIGAVSPPGGDTSEPVTQNTLRVAKVYWALDSSLSQRRHFPAINWLDSYSLYSDRLNKYIGEDNDLDWNDIVKRARVILQEESELEEIVRLVGVDSLSESDRITMLVASMIREDYLQQNAYDDVDAYTPLSKQLKMMQIIMDFESQAREALDVGSYYDEIAKGTGEVREKIGRMKYIEADDMDSFDEIHNSLEDVMKSLVEKGGVDSNA

SEQ ID NO: 4805 - DNA, 501 bp, Alloiococcus otitidis
  CDS (46)..(498)
ggaagagtcaagcgcccaatagaccttcgccacacgaagagtgttttgggtaaccggttcagaagtatccccacctggaggcgaaacggctccaatggctgtaatgctaccgcgacgttcttcatcactgccaagaggttggaccatacccgcccgttcatagtactcagcaattcgggatccaaggtaggcagggtacccttcatccccaggcatctcttccaaacgaccggacatctcacgcaaggcttcggcccaacgagaggtggagtcagccatgacagccacggagtagcccatgtcccggtaatattcagcaatggtaataccagtgtaaatagatgcttcccgggctgccactggcatgttagaggtgttggcgatcaagatggttcgctccataatagacttaccagtttctgggtcagtcaattcagggaactcgttaataacctcggtcatctcgttacctcgttcaccacaaccaatgtagacaactaa

SEQ ID NO: 4806 - protein, 151 aa, Alloiococcus otitidis
MGNRFRSIPTWRRNGSNGCNATATFFITAKRLDHTRPFIVLSNSGSKVGRVPFIPRHLFQTTGHLTQGFGPTRGGVSHDSHGVAHVPVIFSNGNTSVNRCFPGCHWHVRGVGDQDGSLHNRLTSFWVSQFRELVNNLGHLVTSFTTTNVDN

SEQ ID NO: 4807 - DNA, 315 bp, Alloiococcus otitidis
  CDS (4)..(312)
attatggccagtaaaattggagtagttggcgataaagactcaatccttggctttaagatgttaggctttgatgtcagattcgttaatgatggtcaaacagccaaaaaaacaattgatgaaatggctaaagaagatttcggtgtgatttttttaaccgaagaattggcccaagaaatccctgaagcgatcgatcgttatgacacaatgatgacaccggctgttattttaatcccgaaccacaatggctcacagggtatagggagatcacggatcgagaagaacgtcgaaaaagctgtgggtcaaaacatactttag

SEQ ID NO: 4808 - protein, 103 aa, Alloiococcus otitidis
MASKIGVVGDKDSILGFKMLGFDVRFVNDGQTAKKTIDEMAKEDFGVIFLTEELAQEIPEAIDRYDTMMTPAVILIPNHNGSQGIGRSRIEKNVEKAVGQNIL

SEQ ID NO: 4809 - DNA, 1017 bp, Alloiococcus otitidis
  CDS (13)..(1014)
ggaggagaggacatgaaagacaatgattatggatcattgaacgtcaccatacgtgctcaagaaaacaaactccttaagcaaggccattttgaccggatgattgcggcagaatcttatgatgatgcggtgaatatcttgcgtgagacggtttaccggaatgacgtggacgatataaaagaaagtcgggactacgacttgatgctgacccatgaattagagcgggtctaccaagagatgttcacttcaacccccaatccagaattggttgaatatgcagctttaagatacacctatcataatttaaaagtattatttaaagaagaatttgctgatcaagacttttcagacctctatatcaatattggtcgctttagtatccaaagcttgcgacgggccatcaaggaagagcaatcagatctcctacctgaagaatacttgcagagtatttcagaggtcaaagcccaacttgaggaaagcaagcaagcttatgctattgatgtaattttagaccgccattactttgaccacttaaaaagcttggctgaccgcctgggaattgaagatatcataaatttggttaagcaagaagctgattatttcaatatttcaacagccatccgtgccagcaaacaaggccacaaccgtaattttatagatggtattttaacggaagttggctacttggataaggaaaaattagtatccagtgctggtttaggcctgtcagagctagaacgctacttgcggaccagttcttaccggtccctggttgaatcagctactgactcagataacaatgaagtatctgctatcaaggtagatcaattgacagacgatgcttatatgaagaaaatgagagaggctaagttacaagcctttggtcccttaccaactattgcttatatccatgctaaagaggtagaggttactaacttgcggcttgtcttagctggtaaagaaaacggtattgatgccgatacaattagagaaaggatgagactgaattatggccagtaa

SEQ ID NO: 4810 - protein, 334 aa, Alloiococcus otitidis
MKDNDYGSLNVTIRAQENKLLKQGHFDRMIAAESYDDAVNILRETVYRNDVDDIKESRDYDLMLTHELERVYQEMFTSTPNPELVEYAALRYTYHNLKVLFKEEFADQDFSDLYINIGRFSIQSLRRAIKEEQSDLLPEEYLQSISEVKAQLEESKQAYAIDVILDRHYFDHLKSLADRLGIEDIINLVKQEADYFNISTAIRASKQGHNRNFIDGILTEVGYLDKEKLVSSAGLGLSELERYLRTSSYRSLVESATDSDNNEVSAIKVDQLTDDAYMKKMREAKLQAFGPLPTIAYIHAKEVEVTNLRLVLAGKENGIDADTIRERMRLNYGQ

SEQ ID NO: 4811 - DNA, 594 bp, Alloiococcus otitidis
  CDS (7)..(591)
aggaggatgacaatggctgacttaaagcagattacccagcaggttatcgacaaagaaaaaaaatctttagatagcaaggttgaagaagcgaagcaagctgcagatgaagaaattcaagctgccaaggaaaaagcggctcaagacaaggaaagacaattggaacgccttgaccaagaagcctccaaccaatatgacattgaggtcaattccattgcgatcaaggaacgaaacgagaagttaaaaatcaagcaagactatatcaaacaagtcttagctagcgttcaagataagttggacgacttgagttcagaagatttccaaaagtttgcccaaggggttttgagtaactttagtcaagaaggggatgtgaagctctacctaggcgacaagtctcaaggcttagtggaccaagcatggctttcaaacttggacattcaaggactaaatgtgaccttggctgagaccaccatcaagggtgagtctggttttaccctttctaaaaaggggattgaattcaactacttgtttagcgaattgattgctaaccgaagagatgactttgtcagacaaattaaccaagaactattttcttaa

SEQ ID NO: 4812 - protein, 195 aa, Alloiococcus otitidis
MTMADLKQITQQVIDKEKKSLDSKVEEAKQAADEEIQAAKEKAAQDKERQLERLDQEASNQYDIEVNSIAIKERNEKLKIKQDYIKQVLASVQDKLDDLSSEDFQKFAQGVLSNFSQEGDVKLYLGDKSQGLVDQAWLSNLDIQGLNVTLAETTIKGESGFTLSKKGIEFNYLFSELIANRRDDFVRQINQELFS

SEQ ID NO: 4813 - DNA, 498 bp, Alloiococcus otitidis
  CDS (19)..(495)
aaaataggaggaaaaataatggatattagtattttagagctatttggtgaaaacacaggtatggtcatggcaggtttgggtattgccctagctgttgtcctctcaggtaccgggtctgctagaggggttggtgttgcaggtgaagcggcttccgccctcttgaaagataacccagaacttttcgcaaaagccttgatcttacaagctctcccttccacccaagggatttatggattcgttgttggtttctttatcttgttaaacattgaagcaggtatggacccatcaatgggttggtactaccttatgtctggtttaaccgttgggattgctggtattacatctggtccagcccaaggtagagtttccgtttctggtatccaaaccattgcccaaagagaagaagtcaacatccaaactgctatctactctgctatggttgaaacctacgctattttaggcttccttatcgcattattcatgattctatttgcttaa

SEQ ID NO: 4814 - protein, 159 aa, Alloiococcus otitidis
MDISILELFGENTGMVMAGLGIALAVVLSGTGSARGVGVAGEAASALLKDNPELFAKALILQALPSTQGIYGFVVGFFILLNIEAGMDPSMGWYYLMSGLTVGIAGITSGPAQGRVSVSGIQTIAQREEVNIQTAIYSAMVETYAILGFLIALFMILFA

SEQ ID NO: 4815 - DNA, 1968 bp, Alloiococcus otitidis
  CDS (22)..(1965)
cagaggaggtgctcaaagcatatggcaatttctaaaatgaaaaaattgacccttcttgcggaacaagaaaacaaagaccagcttttgcaatccattcaacagttgcaaagtgttgaagtgattcctttgcctaaggtggttgaagaatccattgtcgatgattttgaagtcactagctctagggacgaacaatcggacaatgaccaattttttcaagatgcagaatatgctttagactacctcagtcaatttgttcccaaaccgggtttaattgccagtctgaaagctaaaagggaagtcttgaccttgaaggacttgcaagatcaagttgacttggatgagatccaagccatcatagaccgggtatctgaaaaagaagatcaattaaataaagtggaagaagacctcaaagccttgcgagaggaagaagccttctttagaagatggaagaaactcagccaccaccccaaggaattgaaggaatttgacctcctagaagtgatcttaggttcggtggatgaggactatattaagccctttaaagaagctgttgaagacctagatgataccacttggcaggaagtatactctagcaaggaaagtcttggcttgtatgtcattacacccaaagaccaggccaagtcagtccggagtgaactagcccaatctggtttcagagaattaaattataaatacgacaagttacccgaggaagaactgaaggacaaccaagacaagcgggttcaacttgttgaggaacgtaaggccattaaaaaagacttgagaacttggaaggacgaaaaacggtctttagaattagctattgaattcctttataataagggacaacggattaaggccaaagacctggtcttaaatagccagcacctctttttggcaagcggttggattgaagctgaccaggttgatctcgtaaccgaccaactcaaccaggacttagaggataatgtggctgtgatacccgaggatgtcatggaagaagaatacgatgatgtccctgttgttctgaaaaataatggcctagtcaagccatttgaaatgctgattgagatgtttagctaccccaaatacgggggtcttgacccaacgccttggattgcaccattttacttcatcttctttggcatgatgtcagctgatgcgggttatggtttgctcttattcttggtgacatttgcaggcttgaagattatggatttaggccctgaccaagaacaaaatattcggttctttatgtataacacagtggccaccattattttaggtttaatatttggatccttcttcggatttgaattgcctttccaagtcttaaaccttcaagatgatgttatcactgtcttaattatttcgattatcctgggtgtcatccatattatccttggtttccagttggatgcctactttaaacacaaggatggcgaccacctccaagcttatatcgatgaccactcctggtccatgatcataattggagctgtcgtctttgcagcaggtttaatgttaggcttgccttctatcgtggaaaacatcggcattgccctcattgtcatcaacgcaatcggcattgttatagcctctatgataaccggtagcaatatcttcgttggcttcggccaaggcttgctcggtttaaccgatgtagcagggattacaggggacatagtcagttattcccgtatcatggccttgggtgtggcatcggctaacattgggatggcctttaacttactggttagtgtcttcccaccagtcgtccggttcacactcggtatcatcgtctttattgccctacacttcttaaacatctttattgccttccttggggcatacgtccactccctcagactccacttcgttgaaatgtttggcaagttctatactggcgggggacgtaagttagagcctctaggaaccttacaaaaatatatttggattaaaaaataa

SEQ ID NO: 4816 - protein, 648 aa, Alloiococcus otitidis
MAISKMKKLTLLAEQENKDQLLQSIQQLQSVEVIPLPKVVEESIVDDFEVTSSRDEQSDNDQFFQDAEYALDYLSQFVPKPGLIASLKAKREVLTLKDLQDQVDLDEIQAIIDRVSEKEDQLNKVEEDLKALREEEAFFRRWKKLSHHPKELKEFDLLEVILGSVDEDYIKPFKEAVEDLDDTTWQEVYSSKESLGLYVITPKDQAKSVRSELAQSGFRELNYKYDKLPEEELKDNQDKRVQLVEERKAIKKDLRTWKDEKRSLELAIEFLYNKGQRIKAKDLVLNSQHLFLASGWIEADQVDLVTDQLNQDLEDNVAVIPEDVMEEEYDDVPVVLKNNGLVKPFEMLIEMFSYPKYGGLDPTPWIAPFYFIFFGMMSADAGYGLLLFLVTFAGLKIMDLGPDQEQNIRFFMYNTVATIILGLIFGSFFGFELPFQVLNLQDDVITVLIISIILGVIHIILGFQLDAYFKHKDGDHLQAYIDDHSWSMIIIGAVVFAAGLMLGLPSIVENIGIALIVINAIGIVIASMITGSNIFVGFGQGLLGLTDVAGITGDIVSYSRIMALGVASANIGMAFNLLVSVFPPVVRFTLGIIVFIALHFLNIFIAFLGAYVHSLRLHFVEMFGKFYTGGGRKLEPLGTLQKYIWIKK

SEQ ID NO: 4817 - DNA, 303 bp, Alloiococcus otitidis
  CDS (10)..(300)
atcccttgggtggaagggagagcttgtaagatcaaggcttttgcgaaaagttctgggttatctttcaagagggcggaagccgcttcacctgcaacaccaacccctctagcagacccggtacctgagaggacaacagctagggcaatacccaaacctgccatgaccatacctgtgttttcaccaaatagctctaaaatactaatatccattatttttcctcctattttttatggttattttttaatccaaatatatttttgtaaggttcctagaggctctaacttacgtcccccgccagtatag

SEQ ID NO: 4818 - protein, 97 aa, Alloiococcus otitidis
MEGRACKIKAFAKSSGLSFKRAEAASPATPTPLADPVPERTTARAIPKPAMTIPVFSPNSSKILISIIFPPIFYGYFLIQIYFCKVPRGSNLRPPPV

SEQ ID NO: 4819 - DNA, 234 bp, Alloiococcus otitidis
  CDS (7)..(231)
ctgactatgtcccctgtaatccctgctacatcggttaaaccgagcaagccttggccgaagccaacgaagatattgctaccggttatcatagaggctataacaatgccgattgcgttgatgacaatgagggcaatgccgatgttttccacgatagaaggcaagcctaacattaaacctgctgcaaagacgacagctccaattatgatcatggaccaggagtggtcatcgatataa

SEQ ID NO: 4820 - protein, 75 aa, Alloiococcus otitidis
MSPVIPATSVKPSKPWPKPTKILLPVIIEAITMPIALMTMRAMPMFSTIEGKPNIKPAAKTTAPIMIMDQEWSSI

SEQ ID NO: 4821 - DNA, 357 bp, Alloiococcus otitidis
  CDS (31)..(354)
agtagtcataatcgaaagggggggctagtagtgaaccaagatgcaattgatcaggttaaggatgttgaaaaacgtgccaaagacctgcgtcaggaaagtgaccagtctattaaagaaataaatcaagaaaaggacaaggaacttgaccgtattcaaaaagatttggatcaagaattggaggattatcggtcagaacgtaaagaccaggatagcaagcgtttggatgacaagcgcgaccaatcccaaaaaaatatagaccaggcgaaagaaagctttcggtctagttatgaagacaaggtcgaccaattgtcacaagaattaacagaggaggtgctcaaagcatatggcaatttctaa

SEQ ID NO: 4822 - protein, 108 aa, Alloiococcus otitidis
MNQDAIDQVKDVEKRAKDLRQESDQSIKEINQEKDKELDRIQKDLDQELEDYRSERKDQDSKRLDDKRDQSQKNIDQAKESFRSSYEDKVDQLSQELTEEVLKAYGNF

SEQ ID NO: 4823 - DNA, 480 bp, Alloiococcus otitidis
  CDS (40)..(477)
gttaattttatcaatctgacagtatttgtcaattatattgtgacgaccaagaccgaatcaggtttactagttcaatttttaacaagatattttttattgacacgggaacgaaagttcggtaaactatctttgcaaacatttgttcggggaggaagaaatatggaaaagccaatcgatagaagttacggaccaagtaacttatctaagctaaaagatcgtctcatgaaccagtcagaatttatgtcctttgatattaaaccgcaaatgcctaagaagcaagtttcccactttgtcaagcaagctgtccgccagggtcgtttggttgctatccaaatcaaccaaggagacggcattatcagtgaacttgtcggcactcctagcaggtctaaacagtcccaccacctggtcataaagggacgaaaacataagaccctctacctaatctcaggcagtcaaatccgtcatatccgctacctataa

SEQ ID NO: 4824 - protein, 146 aa, Alloiococcus otitidis
MTTKTESGLLVQFLTRYFLLTRERKFGKLSLQTFVRGGRNMEKPIDRSYGPSNLSKLKDRLMNQSEFMSFDIKPQMPKKQVSHFVKQAVRQGRLVAIQINQGDGIISELVGTPSRSKQSHHLVIKGRKHKTLYLISGSQIRHIRYL

SEQ ID NO: 4825 - DNA, 723 bp, Alloiococcus otitidis
  CDS (22)..(720)
aaccccaaggaggcgagtaagatggacacaatcattcaaaactttgaaggtttggaagatgttgccaacatgtcggtcttccaacagttcttctactattttcagcaaaatggagcctatgtttgggaccaatttgctagacactttttaatctctatttatggcgtcttactggcagctgttattgccattcccttaggcttttacattgccagaaagtccaagttggctgattgggtgattaccattgccaacttgatccaaaccattccttctattgctatattgtccctctttatgctggcaatgggtttgggacccaacactgttattgcaacagtttttgtctactctctccttcccattttgaaaaacacttatgccggggttagaaatgtagaccgggccgtgatggactcagcgaaaggaatggggatgacccgttggcaacaaacctacaaggttgaacttcccttggcactttccgttattatggcaggcgtccgtaatgccctcgttgttgggattgggattgccgccattgggacctttatcggtgctggtggtttaggcgacattatccagcgaggtgtcaatgcaactgatggggcagccatcattctagcaggagctattcctattgccttaatggccgttatcatggacgttgtctttggcttgattgaacgttaccttgacccagttaaagggaagaccaattaa

SEQ ID NO: 4826 - protein, 233 aa, Alloiococcus otitidis
MDTIIQNFEGLEDVANMSVFQQFFYYFQQNGAYVWDQFARHFLISIYGVLLAAVIAIPLGFYIARKSKLADWVITIANLIQTIPSIAILSLFMLAMGLGPNTVIATVFVYSLLPILKNTYAGVRNVDRAVMDSAKGMGMTRWQQTYKVELPLALSVIMAGVRNALVVGIGIAAIGTFIGAGGLGDIIQRGVNATDGAAIILAGAIPIALMAVIMDVVFGLIERYLDPVKGKTN

SEQ ID NO: 4827 - DNA, 978 bp, Alloiococcus otitidis
  CDS (19)..(975)
gataggaaggatgtcaggatgaattttaaaaagatgatcaaaacagctagtttaggtctatcagccctggtactttcagcttgcacttttcccggcctgggtaatgttgaagcagaagatgaaaataccatccgggttgctggccaggcttcaactgaagcaacgatcctaacttatttactggaagacatgattgaacactatattgacaccgacgttgaaaccatcatcaacctaggctcatcaaccatggtccaccaagctatgttgttaggggatgctaatgtaggggctgcaaaatataccgggacctccttaaccggggaaatgaaccaagaccccattaccgaaccggacaaggcccttgaagttgtggtggaaggctttgaccaagaatttgatatggaatggtatccaacttatggttttgctaacacctatgccttcatggtgacccaggatgttgcggatgaatacggttttgaaaaaatttctgatgtcggtccttatgctgacgaattaacagcaggtgttgactcttcttggctagcccgggaaggggacggctatgatgactttgttgaagaatacggctttgacttcgggactgtttaccccatgcagattggtttggtctatgacgccgttgaaaccggagagatggatattgtcctcggttattctacagacggccggattgccagctatgacttggtggttttagaagatgacttgaacttcttcccaccttatgatgccagtccagctgtcaaccaagacctcttggaagactatcctgagctcaatgaaatcatgctcaagttggaagaaaaaatctcacccgagcagatgcaggagatgaactatattgctgacgacatgttgattgagcctgctattgtagcccaaaccttcttacaagagcacaattattttgaagatgctgaaccttacctagaaccccaaggaggcgagtaa

SEQ ID NO: 4828 - protein, 319 aa, Alloiococcus otitidis
MNFKKMIKTASLGLSALVLSACTFPGLGNVEAEDENTIRVAGQASTEATILTYLLEDMIEHYIDTDVETIINLGSSTMVHQAMLLGDANVGAAKYTGTSLTGEMNQDPITEPDKALEVVVEGFDQEFDMEWYPTYGFANTYAFMVTQDVADEYGFEKISDVGPYADELTAGVDSSWLAREGDGYDDFVEEYGFDFGTVYPMQIGLVYDAVETGEMDIVLGYSTDGRIASYDLVVLEDDLNFFPPYDASPAVNQDLLEDYPELNEIMLKLEEKISPEQMQEMNYIADDMLIEPAIVAQTFLQEHNYFEDAEPYLEPQGGE

SEQ ID NO: 4829 - DNA, 480 bp, Alloiococcus otitidis
  CDS (196)..(477)
tgcggtgattaccatagcctcaatcttacaatccctaccttccttggccttgcttgccttgatgatcgttttgtaggggttggtcaagtaccagctattttagccctcttcatctactccctattgccaattctccgcaatacctataccgggattaagtcagtcgatgacaacttagtggatgcagcccggggaatggggatgaaaaatggccaaattttgaccaaggtccaacttcctcaagcggcccccgttattatggctagtatccgcttgtccactacttacgtcattgcttggaccactttggcatcctatattggggcaggtggccttggtgactatattttcggtggactcagtctatacgtacctgaattaattattgcgggtattgtgccagttaccatcttggccttactcgttgattttctcctaagcttattggaaaaacgcgttacaccggtgaacttaagatag

SEQ ID NO: 4830 - protein, 94 aa, Alloiococcus otitidis
MGMKNGQILTKVQLPQAAPVIMASIRLSTTYVIAWTTLASYIGAGGLGDYIFGGLSLYVPELIIAGIVPVTILALLVDFLLSLLEKRVTPVNLR

SEQ ID NO: 4831 - DNA, 480 bp, Alloiococcus otitidis; identical to SEQ ID NO: 4829
  CDS (178)..(477)

SEQ ID NO: 4832 - protein, 100 aa, Alloiococcus otitidis
MDAARGMGMKNGQILTKVQLPQAAPVIMASIRLSTTYVIAWTTLASYIGAGGLGDYIFGGLSLYVPELIIAGIVPVTILALLVDFLLSLLEKRVTPVNLR

SEQ ID NO: 4833 - DNA, 480 bp, Alloiococcus otitidis; identical to SEQ ID NO: 4829
  CDS (124)..(477)

SEQ ID NO: 4834 - protein, 118 aa, Alloiococcus otitidis
MPILRNTYTGIKSVDDNLVDAARGMGMKNGQILTKVQLPQAAPVIMASIRLSTTYVIAWTTLASYIGAGGLGDYIFGGLSLYVPELIIAGIVPVTILALLVDFLLSLLEKRVTPVNLR

SEQ ID NO: 4835 - DNA, 261 bp, Alloiococcus otitidis
  CDS (25)..(258)
aacaagcataggagaggggatacgatgctttcagctatacaagagtttttcgcccaaaatgggccgaccatgcttcgcttaatttgggagcacatttatttatcagtcatttctgtccttttagggattatcgttgctgtcccgcttggcattttcctaaccagggtgaatgaccgggcagctaatgcggtgattaccatagcctcaatcttacaatccctaccttccttggccttgcttgccttgatgatcgttttgtag

SEQ ID NO: 4836 - protein, 78 aa, Alloiococcus otitidis
MLSAIQEFFAQNGPTMLRLIWEHIYLSVISVLLGIIVAVPLGIFLTRVNDRAANAVITIASILQSLPSLALLALMIVL

SEQ ID NO: 4837 - DNA, 1197 bp, Alloiococcus otitidis
  CDS (16)..(1194)
tggaggagtggcaaaatgatcgagttcaaaaatatcagtaaagtctacggcgatgggacccgggctgttgataatttgaatcttaccattgaatcgggtgaactagttgtctttattggtacatccggtagtgggaaaacgactagcatgcggatggtcaaccggatgatcgacccaactgaaggcgatgtcttgattgatggtgaaaacatcaaagacaaagatccagttgaccttagaagaggaattggttatgtgattcaacaaaccggtttaatgccccacatgaccgtctatgaaaatattgtcttagttcctaagcttttaaaatgggacgagaaagacatgcaagacaaggcaagagagctactagaagctgtcgatatgaacccagacgactacttagaccgctatccttctgaattatctggtggacagcagcagcgggttggagtcatccgggccttagcagctgaccaagaaatcatcttaatggacgagcctttcggagccttggacccgatcacgagggaggctttgcaagatttagtcattcaactgcaaaaggattatgaccgaactgttatctttgtcacccacgatatggacgaagccttggacttagcagacaaggtggcaattatgtcagaagggaagttaatccaatatgataccccccacaatattgtggccaaccctgccaatgactttgtcaaagaattgattggggaagaccggctcagcaaggctggaaatgaccaactggtagctgatgtcatgtcgacagacccagtgactgttcaattggggacttccatctcagatgctgtcgctgtgatgcgggataaacgattaaccaacctgattgtaaccgatgacaacaatattgtttacggtgtcttgtacttagagaaaatcaaccaagctaataaagacaagttggttgatgacgttatggaactgcctaaaacctatatcaagcctaactcttatattagagaaattgcagaaaaaatgctcaaacgtggtggcaagttcgaacttgtcttagaagatgattactctctgcaaggctacttaacccacactgacctggttgaagtcgtctaccattctatttggggcggagagagtccgaaagaccaaggcaaggacggacttcaagactacaatgcagccaaactagaacaagcatag

SEQ ID NO: 4838 - protein, 393 aa, Alloiococcus otitidis
MIEFKNISKVYGDGTRAVDNLNLTIESGELVVFIGTSGSGKTTSMRMVNRMIDPTEGDVLIDGENIKDKDPVDLRRGIGYVIQQTGLMPHMTVYENIVLVPKLLKWDEKDMQDKARELLEAVDMNPDDYLDRYPSELSGGQQQRVGVIRALAADQEIILMDEPFGALDPITREALQDLVIQLQKDYDRTVIFVTHDMDEALDLADKVAIMSEGKLIQYDTPHNIVANPANDFVKELIGEDRLSKAGNDQLVADVMSTDPVTVQLGTSISDAVAVMRDKRLTNLIVTDDNNIVYGVLYLEKINQANKDKLVDDVMELPKTYIKPNSYIREIAEKMLKRGGKFELVLEDDYSLQGYLTHTDLVEVVYHSIWGGESPKDQGKDGLQDYNAAKLEQA

SEQ ID NO: 4839 - DNA, 1707 bp, Alloiococcus otitidis
  CDS (82)..(1704)
aaaaataaaaacataaaggtgagagatttgtcgaaaattaaaatcatccccttaggcgggatcagagaaaacagtaagagtatgtatattgttgaagtagaagaccagatatttatcctggacgtcggcctcatgtacccggaaaatgaattgtttggtattgatgctgtcatcccagactttacttatttaagggaaaatgcagaccggattgccggggtctttttatctcacggccacgaggatgccatcggtggtttgccttacctcttggatgagtttgacctccctgtttttggctctgaattgaccattgaattggctaagttgcaaaaccaaaaccatggcaacagcaattttgatgacttccatgtggtgggtcaggatacagaaattgattttgacgggatcttgattaactttttccaagtgacccacaccattccagaatcaatggggatctctatccggactgatgaaggtaatattgtctacacaggtaactttaagtttgaccagagtgcccatgggccctataaaacggactttaaccggatttctgatatcggcaaggaaggggtctttaccctcttaagttcctcaattgaagccgaaagtcaagaagagaatgtgtcggacaaacgggttcaaaaagtggtcaatgagtccttcatccaaaccgatggccggattattgttgcagcggtgaaaagtaatatcttacgaatccagcaaatcctcaatgccactagtttaaccaaccggaaaatctttgtcactggcaaccagttaactgacattttagatacagccgtcaaattgaaaaaacttttcctacccgaaaagaacttaatcaagccaatttcagagattgacaagtacagagacgatcagattgtcgtcttagagactggttctagtggggagcctattaagaccctcagacggatggctaccaaacaacaccagcacgttaacctcaaagaagatgacctggtctatattgctaccagcccttctattgccatggaagttaccgtggccgaaacagaaaatttaatttaccgggctggggccagggtggagaaaatttcagataaaatcaaggcgtcaggccatgctaccccagaagacttacagctgatgatcaacctcttaaaccctcgattctttatcccggtccagggcgaataccggatgttggcagcccatgctgacttggcccatgaagccggcatcaattatagccacatcttcctcttgagtaatggggaagtccttgaataccataaaggtaaaatgtcatcaactggagaggtgccagctgacgataccctggtagatgggatcgggattggcgatgtcggcaatattgtcctacgtgaccgccgactcttgtcggatgatgggatcttggttgccgtggttaccattgaccggaagaaacaaaaaattgtggccgacccccatattgtgacccggggctttatcttcgttaaagaaaactatgatcttattaacgaagccaatgctatcgtcaaaaaggttgtcaaaaagaacctcaaagacaatgattttgactggtcttccatcaaatcagacatccgagatgacctgagcgactacctcttcaagcaaaccaaacggaaccctattatcctccccgttataatggaggtcaaccaaagacgttggtatgacaactag

SEQ ID NO: 4840 - protein, 541 aa, Alloiococcus otitidis
MYIVEVEDQIFILDVGLMYPENELFGIDAVIPDFTYLRENADRIAGVFLSHGHEDAIGGLPYLLDEFDLPVFGSELTIELAKLQNQNHGNSNFDDFHVVGQDTEIDFDGILINFFQVTHTIPESMGISIRTDEGNIVYTGNFKFDQSAHGPYKTDFNRISDIGKEGVFTLLSSSIEAESQEENVSDKRVQKVVNESFIQTDGRIIVAAVKSNILRIQQILNATSLTNRKIFVTGNQLTDILDTAVKLKKLFLPEKNLIKPISEIDKYRDDQIVVLETGSSGEPIKTLRRMATKQHQHVNLKEDDLVYIATSPSIAMEVTVAETENLIYRAGARVEKISDKIKASGHATPEDLQLMINLLNPRFFIPVQGEYRMLAAHADLAHEAGINYSHIFLLSNGEVLEYHKGKMSSTGEVPADDTLVDGIGIGDVGNIVLRDRRLLSDDGILVAVVTIDRKKQKIVADPHIVTRGFIFVKENYDLINEANAIVKKVVKKNLKDNDFDWSSIKSDIRDDLSDYLFKQTKRNPIILPVIMEVNQRRWYDN

SEQ ID NO: 4841 - DNA, 1707 bp, Alloiococcus otitidis; identical to SEQ ID NO: 4839
  CDS (28)..(1704)

SEQ ID NO: 4842 - protein, 559 aa, Alloiococcus otitidis
MSKIKIIPLGGIRENSKSMYIVEVEDQIFILDVGLMYPENELFGIDAVIPDFTYLRENADRIAGVFLSHGHEDAIGGLPYLLDEFDLPVFGSELTIELAKLQNQNHGNSNFDDFHVVGQDTEIDFDGILINFFQVTHTIPESMGISIRTDEGNIVYTGNFKFDQSAHGPYKTDFNRISDIGKEGVFTLLSSSIEAESQEENVSDKRVQKVVNESFIQTDGRIIVAAVKSNILRIQQILNATSLTNRKIFVTGNQLTDILDTAVKLKKLFLPEKNLIKPISEIDKYRDDQIVVLETGSSGEPIKTLRRMATKQHQHVNLKEDDLVYIATSPSIAMEVTVAETENLIYRAGARVEKISDKIKASGHATPEDLQLMINLLNPRFFIPVQGEYRMLAAHADLAHEAGINYSHIFLLSNGEVLEYHKGKMSSTGEVPADDTLVDGIGIGDVGNIVLRDRRLLSDDGILVAVVTIDRKKQKIVADPHIVTRGFIFVKENYDLINEANAIVKKVVKKNLKDNDFDWSSIKSDIRDDLSDYLFKQTKRNPIILPVIMEVNQRRWYDN

SEQ ID NO: 4843 - DNA, 1707 bp, Alloiococcus otitidis; identical to SEQ ID NO: 4839
  CDS (19)..(1704)

SEQ ID NO: 4844 - protein, 562 aa, Alloiococcus otitidis
MRDLSKIKIIPLGGIRENSKSMYIVEVEDQIFILDVGLMYPENELFGIDAVIPDFTYLRENADRIAGVFLSHGHEDAIGGLPYLLDEFDLPVFGSELTIELAKLQNQNHGNSNFDDFHVVGQDTEIDFDGILINFFQVTHTIPESMGISIRTDEGNIVYTGNFKFDQSAHGPYKTDFNRISDIGKEGVFTLLSSSIEAESQEENVSDKRVQKVVNESFIQTDGRIIVAAVKSNILRIQQILNATSLTNRKIFVTGNQLTDILDTAVKLKKLFLPEKNLIKPISEIDKYRDDQIVVLETGSSGEPIKTLRRMATKQHQHVNLKEDDLVYIATSPSIAMEVTVAETENLIYRAGARVEKISDKIKASGHATPEDLQLMINLLNPRFFIPVQGEYRMLAAHADLAHEAGINYSHIFLLSNGEVLEYHKGKMSSTGEVPADDTLVDGIGIGDVGNIVLRDRRLLSDDGILVAVVTIDRKKQKIVADPHIVTRGFIFVKENYDLINEANAIVKKVVKKNLKDNDFDWSSIKSDIRDDLSDYLFKQTKRNPIILPVIMEVNQRRWYDN

SEQ ID NO: 4845 - DNA, 1017 bp, Alloiococcus otitidis
  CDS (34)..(1014)
tcttgtatactacaaacaaaaaggaggagcaaaatggaccagcaaacacttatctaccggctcaaccaggcctttcctgagggcttgaccatccaggaactcgttcaaacaagctctaattccccaagtcaaattcaagaccttatcctagaggccaaaaaccttggcttcccccttgtgacaggagataagcaagtattcctagcccaccccctctactctcaagctggaattgaagcacatttttcgccggacttttccttgcctatccagttagaagaagtaaccgactccaccaacaccttggcccgtcaggcagcaaaccacgttcaggaggcaaccgcctttatggcctacagtcaaagagcgggtgtcggccggctcaaccgtccttggcagtcccccatgggtaaaagtttgtccttatccttactcctgccagacttccccaaagacctacctgtttatcttctaagccaaattacagctgcttctctttgccagtccttagacccctaccttgacaacttaggcattaaatggcccaatgaccttattgcaaaccagcgaaaaatcgctggcattctccctatttttgaccaggatgaaacaggtcgttcctatgtcatcttaggcattggtctcaacctcttccaagacctggaagatttccctaaagacctccaagacaaggctggttcccttaaaatggctgtcggctttgagatagatatcgaccagctcttagctaagctgatcgaggatttagttcgggcaatccaggcctttaaagacaggcaagatggtcaagcctttctagctatttgtcgggagaaatcccttttaatcggcaaggaagtcctaagctatgaaggagataagccggcccgtcaggttaaagtgctagatattgcatccaatggcggcctaaaagtcaaggacttaaaaagcgggcaagaagaagtcctcttgtctagtgagatttccatccgggcacaagatggccactatctctag

SEQ ID NO: 4846 - protein, 327 aa, Alloiococcus otitidis
MDQQTLIYRLNQAFPEGLTIQELVQTSSNSPSQIQDLILEAKNLGFPLVTGDKQVFLAHPLYSQAGIEAHFSPDFSLPIQLEEVTDSTNTLARQAANHVQEATAFMAYSQRAGVGRLNRPWQSPMGKSLSLSLLLPDFPKDLPVYLLSQITAASLCQSLDPYLDNLGIKWPNDLIANQRKIAGILPIFDQDETGRSYVILGIGLNLFQDLEDFPKDLQDKAGSLKMAVGFEIDIDQLLAKLIEDLVRAIQAFKDRQDGQAFLAICREKSLLIGKEVLSYEGDKPARQVKVLDIASNGGLKVKDLKSGQEEVLLSSEISIRAQDGHYL

SEQ ID NO: 4847 - DNA, 294 bp, Alloiococcus otitidis
  CDS (7)..(291)
gctgctatgttagaagaccaacgcaaggaaatcgaccggattgaccaggaaattgtcaggctattcgaattacggtgccaagctatcgaagccattgccgaactcaagcttaaaaacaagatcgctgtcctggaccaagaccgggaaaagcaagtgatcgcaaaggtccaatcctacctgagtgatgacagccttaaggaagagattgcagacttataccaaaacctaatgcggatctcccgtctccaccagactaaatggataaaaaagcgggaaaagtcacaagaatcttaa

SEQ ID NO: 4848 - protein, 95 aa, Alloiococcus otitidis
MLEDQRKEIDRIDQEIVRLFELRCQAIEAIAELKLKNKIAVLDQDREKQVIAKVQSYLSDDSLKEEIADLYQNLMRISRLHQTKWIKKREKSQES

SEQ ID NO: 4849 - DNA, 2124 bp, Alloiococcus otitidis
  CDS (4)..(2121)
accatgaccaaaaaagtatttaccaaagaatttgctggacgaaccctccaagtcgaagtgggccagcttgccaagcaggctaatgcagcagttttaatccggtatgacaacactgctgtcttgacagcagtagtcaacggcgatgagccgagcaccatgcccttctttcccctcatggtgaattatgaagagaagatgtactcagtcggtaaaatacctggtggctttattaaacgcgaaggacgcccttcagaacacgccactctaactgcccgcttaattgaccgtcctattcgtcctctcttcccagaaggctttcagtatgaagtacaaatttataacacggtgatgtccgttgaccctgactgttcgcctgaaatggccgccatgtttggctcttctctagccctttccatttctagcctgccttttaatggccccatagcgggtgttaatgtcggtcgggttgatgggaaattgatcatcaatccgactgaagaagaggatgcagcttctgacatccacttaactgtggcaggaaccaaggaagccatcaatatggtggaatctggagctgaccaggtttctgaagaagatatgctagaggccctcttgtttggccaccaagccatccaagacttgtgtcttttccaagaagagattatcgctgaaattggccaagaaaaaatggactatgacctggtcttgccggatcccgaattggtagctgaagtgaaagaccagtttaacgaccaaatgacccaggccatccagaccaaggacaaacaagagcggggtgccaagattgaggccgttaaagaggccattttggcttactacgaggaaaaataccaggaccaagacgaggaattcttggccgacttagcctctgatgtcaaagaaatagctgacgacctggaaaaagaagaagttagacgcttgatcactgaagaaaaagtgagaccagacggccggaaagttgatgaaatccgtgacctagaatcagaagtgggcctctttgcccgggttcatggatccggtctctttacaagaggacaaacccaggccttgtccgccttaaccctaggcccattaaatgaacaccaagtgattgacggcttgagttcagaagaagaaaaacgctttatccaccactataacttcccaagttattcagtcggggagaccggtcggccgaagtcaccaggccggcgggaaattggccacggtgccttgggtgagcgagctttagaacccatcatcccaagccaggaagatttcccttacactattcgactggtagcagaagtccttgaatccaatggatcttcttcccaagcttccatctgtgccggctcccttgccctgatggacggtggggttcccattaaggcgccagtaggtgggattgccatggggcttgttatgaatagccctgaagaatatactgtcttaacagacatccaaggtttggaagaccacctaggagacatggactttaaggtagctgggacccggcaaggtattacagccttacagatggacattaaaattgaagggatcaccgaggcgattttaaaagaggccttggcttctgctaaagaggcacgcatgtccgttttagataatatggaaaaagcaatcgcccagcctcgcccagaactcagcccttatgcgcctaaaatcaagtcgattaaaattaagcccgagcaaattaaaattgtcatcggtaagggtggggaccaaattaacgaaatcattgatgaaactggtgtcaaaattgatatcgacgatgacggaaatgtttccgtttatggtcaagaccaggccatgattgaccgagctattgaaatcattgaagaattgactgaagaagtggaagtcggcaaaatctacaagggtaaggttgtccgaattgaaaaattcggggcctttgttgaaattatcaagggaactgatggcttagtccacatctcagaactagcagacggttttgtgagaaatgtcgacgatgttgttaagttaggagaagagctggaagtcctagtgactgaaatagacagcaagggcagggtcaacttatcccgtaaacaggcccttcataaactcgaaaaagagtcataa

SEQ ID NO: 4850 - protein, 706 aa, Alloiococcus otitidis
MTKKVFTKEFAGRTLQVEVGQLAKQANAAVLIRYDNTAVLTAVVNGDEPSTMPFFPLMVNYEEKMYSVGKIPGGFIKREGRPSEHATLTARLIDRPIRPLFPEGFQYEVQIYNTVMSVDPDCSPEMAAMFGSSLALSISSLPFNGPIAGVNVGRVDGKLIINPTEEEDAASDIHLTVAGTKEAINMVESGADQVSEEDMLEALLFGHQAIQDLCLFQEEIIAEIGQEKMDYDLVLPDPELVAEVKDQFNDQMTQAIQTKDKQERGAKIEAVKEAILAYYEEKYQDQDEEFLADLASDVKEIADDLEKEEVRRLITEEKVRPDGRKVDEIRDLESEVGLFARVHGSGLFTRGQTQALSALTLGPLNEHQVIDGLSSEEEKRFIHHYNFPSYSVGETGRPKSPGRREIGHGALGERALEPIIPSQEDFPYTIRLVAEVLESNGSSSQASICAGSLALMDGGVPIKAPVGGIAMGLVMNSPEEYTVLTDIQGLEDHLGDMDFKVAGTRQGITALQMDIKIEGITEAILKEALASAKEARMSVLDNMEKAIAQPRPELSPYAPKIKSIKIKPEQIKIVIGKGGDQINEIIDETGVKIDIDDDGNVSVYGQDQAMIDRAIEIIEELTEEVEVGKIYKGKVVRIEKFGAFVEIIKGTDGLVHISELADGFVRNVDDVVKLGEELEVLVTEIDSKGRVNLSRKQALHKLEKES

SEQ ID NO: 4851 - DNA, 387 bp, Alloiococcus otitidis
  CDS (58)..(384)
gggctgagttctgggcgaggctgggcgattgctttttccatattatctaaaacggacatgcgtgcctctttagcagaagccaaggcctcttttaaaatcgcctcggtgatcccttcaattttaatgtccatctgtaaggctgtaataccttgccgggtcccagctaccttaaagtccatgtctcctaggtggtcttccaaaccttggatgtctgttaagacagtatattcttcagggctattcataacaagccccatggcaatcccacctactggcgccttaatgggaaccccaccgtccatcagggcaagggagccggcacagatggaagcttgggaagaagatccattggattcaaggacttctgctaccagtcgaatagtgtaa

SEQ ID NO: 4852 - protein, 109 aa, Alloiococcus otitidis
MRASLAEAKASFKIASVIPSILMSICKAVIPCRVPATLKSMSPRWSSKPWMSVKTVYSSGLFITSPMAIPPTGALMGTPPSIRAREPAQMEAWEEDPLDSRTSATSRIV

SEQ ID NO: 4853 - DNA, 294 bp, Alloiococcus otitidis
  CDS (7)..(291)
ttcaccatgaggggaaagaagggcatggtgctcggctcatcgccgttgactactgctgtcaagacagcagtgttgtcataccggattaaaactgctgcattagcctgcttggcaagctggcccacttcgacttggagggttcgtccagcaaattctttggtaaatacttttttggtcatggtctactccctttctgaacattacccgctactctacaaatatcaatattctcgcctgaatactcatatttgtatagtagcttgtgtaatgctgtcttgtttgcttaaaaaataa

SEQ ID NO: 4854 - protein, 95 aa, Alloiococcus otitidis
MRGKKGMVLGSSPLTTAVKTAVLSYRIKTAALACLASWPTSTWRVRPANSLVNTFLVMVYSLSEHYPLLYKYQYSRLNTHICIVACVMLSCLLKK

SEQ ID NO: 4855 - DNA, 363 bp, Alloiococcus otitidis
  CDS (94)..(360)
acaagccaagtaagcacagaccttcgcttggatgggcgattcaccaacgccatctcagtgaatggattcaatgaagagaaagaggtggaacttatggcagtttctcaggcaagaaagaacgaaatcattaaggaatatgcacttcacgaaggagacactgggtctccagaagtccaaattgccgttttaactgaggaaatcacggaattaaacgagcactctaaagtgcacaaaaaagatttccattcaaaacgaggcttattgaagaagatcggtcgtcgtcgtaatttgttagcatacttgcgaaataaagatattacacgctaccgtgaattgattaatcgtttaggattacgtcgttaa

SEQ ID NO: 4856 - protein, 89 aa, Alloiococcus otitidis
MAVSQARKNEIIKEYALHEGDTGSPEVQIAVLTEEITELNEHSKVHKKDFHSKRGLLKKIGRRRNLLAYLRNKDITRYRELINRLGLRR

SEQ ID NO: 4857 - DNA, 363 bp, Alloiococcus otitidis; identical to SEQ ID NO: 4855
  CDS (58)..(360)

SEQ ID NO: 4858 - protein, 101 aa, Alloiococcus otitidis
MNGFNEEKEVELMAVSQARKNEIIKEYALHEGDTGSPEVQIAVLTEEITELNEHSKVHKKDFHSKRGLLKKIGRRRNLLAYLRNKDITRYRELINRLGLRR

SEQ ID NO: 4859 - DNA, 363 bp, Alloiococcus otitidis; identical to SEQ ID NO: 4855
  CDS (28)..(360)

SEQ ID NO: 4860 - protein, 111 aa, Alloiococcus otitidis
MDGRFTNAISVNGFNEEKEVELMAVSQARKNEIIKEYALHEGDTGSPEVQIAVLTEEITELNEHSKVHKKDFHSKRGLLKKIGRRRNLLAYLRNKDITRYRELINRLGLRR

SEQ ID NO: 4861 - DNA, 2010 bp, Alloiococcus otitidis
  CDS (16)..(2007)
gtaaggagattagccatgaccaacccagattcagtttttgatttacagtcaaaataccaacctgcaggtgaccaaccccaagctattaaaaaaattgcccaaggtatcttaaaccaccaaaaagaacaagtcctactaggggggacagggacaggtaagaccttcactatctccaatgtcatccaggaagtctccaagcccaccttggttattgctcacaacaagaccctagccggacaactctacacggaaatcaaggaattattccctaataatgcagtagagtactttgttagttactatgactactatcaacctgaagcttatgtcccttcaacggatacctttattgaaaaagatgcttccattaatgatgaaattgataaattgcgtcactctgccacttcttctattctggagcgacgggacaccattgttgttgcctcagtttcttgtatctatggtttggtcaatcctctcgactaccgtgaccatgtcctttctttaagagaaggaactgaaatgagccgggatgaattgctggcccgtttggttgacatgcaatacgaacggaatgacattgacttccaacggggacggttccgagtccggggcgatattgtggagattttcttggtttcccggagttcagaggccatccgggttgagttttttggggatgaaatcgacaggatccgggaagtggacgttgtaacaggcgaagtaagagaatccctcaagcacgttgctgttttccctgccacccactttgtctcaagcaaggagcaaacggaagaagctattcattccatccgggtggaactcaaagaacaattgagcaaactgaatgatgaaaataaactgttagaagcccaaagactagagcaaagaacggaatacgatattgaaatgctcaaggaaatgggctattgttcaggtattgaaaactactcccttcacatggatggcagaaagccgggagaacccccttacaccttgcttgactttttcccagaagattcgctttttatcatcgatgagtcccacatgaccatgccccagattcggggcatgtacaatggggacaaggcccggaaggaaatgctggtggactacggtttccgcttaccctctgccttagacaaccgacccctgcgcttggaagaatttgaagaccgggttccccaaatttgctacatttcagccactccagccgattatgaattagatcggtcttctcaagtggtggaacaaatcattcgcccaactggcctcttagacccagagattgaagtgcgaccgattgaaggtcagatcgatgacctcattaatgaaattcaaaaacggattgacttgaatgaaagaacttttatcacaaccctaaccaagaaaatggcagaagacttgaccgactacttgaaagaagtggggatcaaggtccgctacctccacagtgatatcaaaaccttggagcggactgaaatcatccgggacctccgccgtggtgactttgatgtcttgatcgggattaacttgctacgagaagggttggatgtgccggaagtttccttagtcgccattttggatgcggacaaggaaggtttcttacgaggcacccggtctttgatccaaacagcaggccgggcagcccggaatgccagtggtaaggtcatcatgtatgccgaccatatgacggattccatgaaaactacaatcgatgaaacggaaagaagacgggccatccaacagcaatttaacgaagaccacggcattactccccaaaccatccgcaaagaagtccctgacctcatcagtattgctaaggtggaagacgacgatggccaaggtttgaccgaagaaaaaatcaaaaaattgtccgtagatgaaagacgggacatgatcgacagtatggaatatgaaatgcaagaagcagctaagaaccttgaatttgagaaagcagctaatttaagggatgttgtcatggaaattaagagtaagtttaaagcttaa

SEQ ID NO: 4862 - protein, 664 aa, Alloiococcus otitidis
MTNPDSVFDLQSKYQPAGDQPQAIKKIAQGILNHQKEQVLLGGTGTGKTFTISNVIQEVSKPTLVIAHNKTLAGQLYTEIKELFPNNAVEYFVSYYDYYQPEAYVPSTDTFIEKDASINDEIDKLRHSATSSILERRDTIVVASVSCIYGLVNPLDYRDHVLSLREGTEMSRDELLARLVDMQYERNDIDFQRGRFRVRGDIVEIFLVSRSSEAIRVEFFGDEIDRIREVDVVTGEVRESLKHVAVFPATHFVSSKEQTEEAIHSIRVELKEQLSKLNDENKLLEAQRLEQRTEYDIEMLKEMGYCSGIENYSLHMDGRKPGEPPYTLLDFFPEDSLFIIDESHMTMPQIRGMYNGDKARKEMLVDYGFRLPSALDNRPLRLEEFEDRVPQICYISATPADYELDRSSQVVEQIIRPTGLLDPEIEVRPIEGQIDDLINEIQKRIDLNERTFITTLTKKMAEDLTDYLKEVGIKVRYLHSDIKTLERTEIIRDLRRGDFDVLIGINLLREGLDVPEVSLVAILDADKEGFLRGTRSLIQTAGRAARNASGKVIMYADHMTDSMKTTIDETERRRAIQQQFNEDHGITPQTIRKEVPDLISIAKVEDDDGQGLTEEKIKKLSVDERRDMIDSMEYEMQEAAKNLEFEKAANLRDVVMEIKSKFKA

SEQ ID NO: 4863 - DNA, 564 bp, Alloiococcus otitidis
  CDS (25)..(561)
gctttaaacttactcttaatttccatgacaacatcccttaaattagctgctttctcaaattcaaggttcttagctgcttcttgcatttcatattccatactgtcgatcatgtcccgtctttcatctacggacaattttttgattttttcttcggtcaaaccttggccatcgtcgtcttccaccttagcaatactgatgaggtcagggacttctttgcggatggtttggggagtaatgccgtggtcttcgttaaattgctgttggatggcccgtcttctttccgtttcatcgattgtagttttcatggaatccgtcatatggtcggcatacatgatgaccttaccactggcattccgggctgcccggcctgctgtttggatcaaagaccgggtgcctcgtaagaaaccttccttgtccgcatccaaaatggcgactaaggaaacttccggcacatccaacccttctcgtagcaagttaatcccgatcaagacatcaaagtcaccacggcggaggtcccggatgatttcagtccgctccaaggttttgatatcactgtggaggtag

SEQ ID NO: 4864 - protein, 179 aa, Alloiococcus otitidis
MTTSLKLAAFSNSRFLAASCISYSILSIMSRLSSTDNFLIFSSVKPWPSSSSTLAILMRSGTSLRMVWGVMPWSSLNCCWMARLLSVSSIVVFMESVIWSAYMMTLPLAFRAARPAVWIKDRVPRKKPSLSASKMATKETSGTSNPSRSKLIPIKTSKSPRRRSRMISVRSKVLISLWR

SEQ ID NO: 4865 - DNA, 303 bp, Alloiococcus otitidis
  CDS (52)..(300)
gttagcaagctagcaaccagctcagttagattagacaaggagtgttacaatatggcaaataatccacaaacttttaaacgtattcgccaagatgagaaaaaacgtcaactgcataaaagtcaaattaccgggatgagaactgctaagaaacgattcttaaaagcagctcaaaataatgaggacaatgcccaagacctataccgacaagcagtttctgctatagaccgggctgtgacaaaagggcacatccataagaataaagctgcccgtgacaagtcacgtttagctaaaaaattaggctaa

SEQ ID NO: 4866 - protein, 83 aa, Alloiococcus otitidis
MANNPQTFKRIRQDEKKRQLHKSQITGMRTAKKRFLKAAQNNEDNAQDLYRQAVSAIDRAVTKGHIHKNKAARDKSRLAKKLG

SEQ ID NO: 4867 - DNA, 1053 bp, Alloiococcus otitidis
  CDS (22)..(1050)
aagaagaagggaggaagactgatgaaaattgaagaccaactcaaaaaaattaaagaccaagacttgtctcccctctacctggtccagggagatgaccagtacttgttagaccaggttaaaaaaagtttgagccaggcccttttggaccaggatgaagcttctatgaattttggtcaatttaatatgatggctgatagcctagacatggccttgtctgatgcggaatcctatcccttttttggggacaagcgcctggtttacatccaagacccctttttcctaacaggggagaagcggaaaacagatctggaccatgacttggatcgcttgctggcttacctccaaaacccagccgactttactgttctcgtcttctttgccccctatgagaaactggacaagcggaagaaggtcaccaaagccctattgcaggaagctgagattatagatgccagttccccagaccaaagagatctaaaagatatggtccagaaaaaagtaaaggctcgaggctaccagtttgacaaaggagctttaaaggccctggttgaaaaaaccaatgccaacttaagtcgggtcatgcaagagttggacaagttattcttgtaccatttagatgacaaaatcatcaccgtccagtcagttgaccaggtcgtatcaccaagcctggaaagtaatgtctttagtattaacgactatattttaagcgggcaaagccaggctgctatacgggcctttaatgacttaattcaacaaaaggaagagccaattaaaatcatcgccattatgatgaaccaattccgtttattattgcaggttaaaatattgcggactaagggctaccaacaaggagagatcgctaaaatcttaaaagttcacccctaccgggttaagctagccatagagaaacaggagattttttccaagcaaagtctatcgaccgcctaccgctacttaattgagtcagatcatttgattaaaacgggcaaggtgacctcgcaattgcaatttgaactttttgccctacaatttaaagattctgtcatgaattaa

SEQ ID NO: 4868 - protein, 343 aa, Alloiococcus otitidis
MKIEDQLKKIKDQDLSPLYLVQGDDQYLLDQVKKSLSQALLDQDEASMNFGQFNMMADSLDMALSDAESYPFFGDKRLVYIQDPFFLTGEKRKTDLDHDLDRLLAYLQNPADFTVLVFFAPYEKLDKRKKVTKALLQEAEIIDASSPDQRDLKDMVQKKVKARGYQFDKGALKALVEKTNANLSRVMQELDKLFLYHLDDKIITVQSVDQVVSPSLESNVFSINDYILSGQSQAAIRAFNDLIQQKEEPIKIIAIMMNQFRLLLQVKILRTKGYQQGEIAKILKVHPYRVKLAIEKQEIFSKQSLSTAYRYLIESDHLIKTGKVTSQLQFELFALQFKDSVMN

SEQ ID NO: 4869 - DNA, 2352 bp, Alloiococcus otitidis
  CDS (1414)..(2349)
gcaataagcacttgcatgaagtataagtggttactgctagccattatggtcttagccctggcctgtcttctagggactggccacttcctagcctggcttgtgacaattttttggttgggccgactgctatctttcaaaaacaaaaaagttttaagcctggccttacttttgtctgctcttttagtcttccgttacaatttcatcaaaaatgagtccagcctctctactgacttggaccaggcacagggactaggcttgccgaccacaaccaggcttgacggagacaagttaacctttgaagcctaccttcctgactaccaagaaaaagtgatggtccaccacctttttgctagtcaagccgaaaaagaaagcttccagattgacgccattcaatcctttaccatccaaggtaagcttgaacaagcccaacccaataccaatattaaccagtttaactaccagtcctatctggctcgacaagggattttttatatttttaaggctgaaaaactccagcccatacctgacccaggagggagattaccactatttctttacttagaccgggctaggcagaaggtcttgcaaggtctggagaaagtcttcactggtcctgttttgccctatatccaaaccttagtatttggccatcaaaaagccatggcaagagaccaggttaacttgtttaaagaactcggtattatccatattatcagtatttcagggctccatgtagacttattggttcaaattttatctcaaattttgtcctttttccgggtcagccgagaccgaagcctgattttccttatctttgtcctgcccctctttagcctgcttgcaggcttggggacgagtgtctttcgggcagtcgtgtcaaaccttttgtactttatttttcgcttaaagggggtcaatttagctaaaagtgatgcctggtccataaccttgatcttagccttattgcttaaccccttagttattttcgggattggctttcaattaagttatgggatcagtggccttcttcttttaattgaagaaaggcaactattaaagacctataaaccagtcaaccagcttttggtccttaacttattagtgaatatgttcgttatcctttttgttagctaccactattttgaatttcccttgatctcttacttcttaaatatcatttttgtccctatcttctccctagttatttttcccatggtcttagtctgtcttttcctaggcctagtcctgcatcagactggttttggggcctggattatgacttacaccaattttgttttagagtccatggaagacctattatcctgggttcataactatggatcttttaccatcactccaggacgcctatcttggccggtctacctcggcttagctgtcattttttacctggtcttggtatacttgcaagccaagaagaagaaaatctgggccttattgggtttggctacactttttattttaggtctgtctagtcagcaattctctcctcttggtcaggtttatgtctttgatgttggccagggggacgcgatcttggtcaaacctccaatgtcagcttccggaattatgattgacacagggggtcagttcaaatggcaggaaaaagaagactggcaaaagcgagaaagagacttttccttagcccgggatgaaattattcccactctaaaatccatgggcatcagccatttagaggctctctacctgacccatggtgattatgaccatgtgggggaaacccaggccttacttgaccatttccctgtttcagaaattcgggtcagccaaacgacttaccagtcagatatcatccaggcttttgcccgggctggaatcgactttaagttagttgaggctggtcaagtttaccgtcatcattccttgactttggctgttcttcaccccaaagagctaacagaagacagcaatgatgcttccctagttttgtatggcaagcttgggggtgaaggttggctttttacaggggacattgaagccggtggggaggaagcgattatggcctcctatcccaacttacaaattgataacttaaagctagcccaccatgggagtaaaacttcctcaggccaggcctttatcgaccattaccggcctaagcgggcttatatttctgccggtcgcttaaatccctacggccatccccattctgaggtcttggaccgtttagagggggtggggactcaggtctttcggactgaccaagccggtggtttgatttatacttacagtgacctagaatgcttgattcagctagttaaaaaatatgaccaagtaataaaagaagaagggaggaagactgatgaaaattga

SEQ ID NO: 4870 - protein, 312 aa, Alloiococcus otitidis
MVYLQAKKKKIWALLGLATLFILGLSSQQFSPLGQVYVFDVGQGDAILVKPPMSASGIMIDTGGQFKWQEKEDWQKRERDFSLARDEIIPTLKSMGISHLEALYLTHGDYDHVGETQALLDHFPVSEIRVSQTTYQSDIIQAFARAGIDFKLVEAGQVYRHHSLTLAVLHPKELTEDSNDASLVLYGKLGGEGWLFTGDIEAGGEEAIMASYPNLQIDNLKLAHHGSKTSSGQAFIDHYRPKRAYISAGRLNPYGHPHSEVLDRLEGVGTQVFRTDQAGGLIYTYSDLECLIQLVKKYDQVIKEEGRKTDEN

SEQ ID NO: 4871 - DNA, 2352 bp, Alloiococcus otitidis; identical to SEQ ID NO: 4869
  CDS (1153)..(2349)

SEQ ID NO: 4872 - protein, 399 aa, Alloiococcus otitidis
MISYFLNIIFVPIFSLVIFPMVLVCLFLGLVLHQTGFGAWIMTYTNFVLESMEDLLSWVHNYGSFTITPGRLSWPVYLGLAVIFYLVLVYLQAKKKKIWALLGLATLFILGLSSQQFSPLGQVYVFDVGQGDAILVKPPMSASGIMIDTGGQFKWQEKEDWQKRERDFSLARDEIIPTLKSMGISHLEALYLTHGDYDHVGETQALLDHFPVSEIRVSQTTYQSDIIQAFARAGIDFKLVEAGQVYRHHSLTLAVLHPKELTEDSNDASLVLYGKLGGEGWLFTGDIEAGGEEAIMASYPNLQIDNLKLAHHGSKTSSGQAFIDHYRPKRAYISAGRLNPYGHPHSEVLDRLEGVGTQVFRTDQAGGLIYTYSDLECLIQLVKKYDQVIKEEGRKTDEN

SEQ ID NO: 4873 - DNA, 2352 bp, Alloiococcus otitidis; identical to SEQ ID NO: 4869
  CDS (742)..(2349)

SEQ ID NO: 4874 - protein, 536 aa, Alloiococcus otitidis
MVQILSQILSFFRVSRDRSLIFLIFVLPLFSLLAGLGTSVFRAVVSNLLYFIFRLKGVNLAKSDAWSITLILALLLNPLVIFGIGFQLSYGISGLLLLIEERQLLKTYKPVNQLLVLNLLVNMFVILFVSYHYFEFPLISYFLNIIFVPIFSLVIFPMVLVCLFLGLVLHQTGFGAWIMTYTNFVLESMEDLLSWVHNYGSFTITPGRLSWPVYLGLAVIFYLVLVYLQAKKKKIWALLGLATLFILGLSSQQFSPLGQVYVFDVGQGDAILVKPPMSASGIMIDTGGQFKWQEKEDWQKRERDFSLARDEIIPTLKSMGISHLEALYLTHGDYDHVGETQALLDHFPVSEIRVSQTTYQSDIIQAFARAGIDFKLVEAGQVYRHHSLTLAVLHPKELTEDSNDASLVLYGKLGGEGWLFTGDIEAGGEEAIMASYPNLQIDNLKLAHHGSKTSSGQAFIDHYRPKRAYISAGRLNPYGHPHSEVLDRLEGVGTQVFRTDQAGGLIYTYSDLECLIQLVKKYDQVIKEEGRKTDEN

SEQ ID NO: 4875 - DNA, 2352 bp, Alloiococcus otitidis; identical to SEQ ID NO: 4869
  CDS (16)..(2349)

SEQ ID NO: 4876 - protein, 778 aa, Alloiococcus otitidis
MKYKWLLLAIMVLALACLLGTGHFLAWLVTIFWLGRLLSFKNKKVLSLALLLSALLVFRYNFIKNESSLSTDLDQAQGLGLPTTTRLDGDKLTFEAYLPDYQEKVMVHHLFASQAEKESFQIDAIQSFTIQGKLEQAQPNTNINQFNYQSYLARQGIFYIFKAEKLQPIPDPGGRLPLFLYLDRARQKVLQGLEKVFTGPVLPYIQTLVFGHQKAMARDQVNLFKELGIIHIISISGLHVDLLVQILSQILSFFRVSRDRSLIFLIFVLPLFSLLAGLGTSVFRAVVSNLLYFIFRLKGVNLAKSDAWSITLILALLLNPLVIFGIGFQLSYGISGLLLLIEERQLLKTYKPVNQLLVLNLLVNMFVILFVSYHYFEFPLISYFLNIIFVPIFSLVIFPMVLVCLFLGLVLHQTGFGAWIMTYTNFVLESMEDLLSWVHNYGSFTITPGRLSWPVYLGLAVIFYLVLVYLQAKKKKIWALLGLATLFILGLSSQQFSPLGQVYVFDVGQGDAILVKPPMSASGIMIDTGGQFKWQEKEDWQKRERDFSLARDEIIPTLKSMGISHLEALYLTHGDYDHVGETQALLDHFPVSEIRVSQTTYQSDIIQAFARAGIDFKLVEAGQVYRHHSLTLAVLHPKELTEDSNDASLVLYGKLGGEGWLFTGDIEAGGEEAIMASYPNLQIDNLKLAHHGSKTSSGQAFIDHYRPKRAYISAGRLNPYGHPHSEVLDRLEGVGTQVFRTDQAGGLIYTYSDLECLIQLVKKYDQVIKEEGRKTDEN

SEQ ID NO: 4877 - DNA, 495 bp, Alloiococcus otitidis
  CDS (16)..(492)
ataggaggtcaagccatgacgaccaaacgcattccttgggaccaatattttatggcccaaagtattttaatttccatgcggtctacctgtcaaaggctggctgtcggggcaactattgtcaaagacaagcgggttatttctggcggttacaatgggtcggtcagcggggaaccccactgtatcgatgttggttgctatatagaagatggtcattgcttgagaactatccatgctgaagaaaatgccatcttacagtgtagcaagtttgggtcttctactgatggtgcagctatctacgtgacccactttccctgcctgcagtgcaccaaacacttaatccaggccggtataaaagaaatttactacttgaaagattaccacaaccatccttatgccatggaattaatcgaccatgcaggtattcatctcaaaaaagttgagatggatgaccaggtttttaaagccattcagtccttcaccccagaccagccctaa

SEQ ID NO: 4878 - protein, 159 aa, Alloiococcus otitidis
MTTKRIPWDQYFMAQSILISMRSTCQRLAVGATIVKDKRVISGGYNGSVSGEPHCIDVGCYIEDGHCLRTIHAEENAILQCSKFGSSTDGAAIYVTHFPCLQCTKHLIQAGIKEIYYLKDYHNHPYAMELIDHAGIHLKKVEMDDQVFKAIQSFTPDQP

SEQ ID NO: 4879 - DNA, 657 bp, Alloiococcus otitidis
  CDS (22)..(654)
gacagaagaggaggggaaagcatggaaaaagtcaaagaggtttggcaagactattggcaaattattatagctgtcctagtccttagttttttggtcctgttctttcttttaaaccaagttaagggtcaggaccaagaggaaggggattttgctagtttagtagagggaggggaagaggtggtcctagacatgggccaagaggatgagctattgccagaggagacagaaacatggattatggttgacattaagggttttgtcacctatccgggggtttatgaagttctggcagattctagaattcaggatgttgttgaacttgctgggggactcagtcctgaagccaaccctctgacctttaaccttgcccagaaagtccgtgatgaaatggttatctatatcggtggaccggatgacccggaagtgaccaatcaaccagctgggactagtgaaggaggtgagagcctagtcgttaatattaatgaagctagtaaggaagaattaatgcaattaaatagtatcgggccaaccaaggcagataatattattcaataccgggaagaccatggtggttttaaaacaattgaagaactgaagaatgtctccggaatcggggataaaatatttgaaaaccttaaggataatctttcaatctaa

SEQ ID NO: 4880 - protein, 211 aa, Alloiococcus otitidis
MEKVKEVWQDYWQIIIAVLVLSFLVLFFLLNQVKGQDQEEGDFASLVEGGEEVVLDMGQEDELLPEETETWIMVDIKGFVTYPGVYEVLADSRIQDVVELAGGLSPEANPLTFNLAQKVRDEMVIYIGGPDDPEVTNQPAGTSEGGESLVVNINEASKEELMQLNSIGPTKADNIIQYREDHGGFKTIEELKNVSGIGDKIFENLKDNLSI

SEQ ID NO: 4881 - DNA, 477 bp, Alloiococcus otitidis
  CDS (1)..(474)
atgaatcgcgcaatctatgcaggcagttttgatccgattaccctgggccacctggatatcattaaaagggccagccacttattcgatgaagtcatcgttgcagttgctaataatacatcgaaaaatagtatgttgaactttgaccaaaaattgaacctggttgaacaatcaattgctagccagggtctagctaatgttcaagccaagacattagagtcaggcttgattgttgactttgctaaggaccaaggagctagtagtctggttagggggttgcggtcggttaaagactttgaatatgagattgccattgaggacttaaataaggtccaagacccagctattgaaacagtttacctagtctcgtcttccaaataccggtccatttcttcctctattgttcgggaaattattaagtttaatggccggcttgatgacctagtacctgaccccgtcgtcgaatattttaaaaaataa

SEQ ID NO: 4882 - protein, 158 aa, Alloiococcus otitidis
MNRAIYAGSFDPITLGHLDIIKRASHLFDEVIVAVANNTSKNSMLNFDQKLNLVEQSIASQGLANVQAKTLESGLIVDFAKDQGASSLVRGLRSVKDFEYEIAIEDLNKVQDPAIETVYLVSSSKYRSISSSIVREIIKFNGRLDDLVPDPVVEYFKK

SEQ ID NO: 4883 - DNA, 564 bp, Alloiococcus otitidis
  CDS (10)..(561)
ggtggatgtatgcgaattattgctggcaaatatggtggacggccactcaagtctgaggtaagtgatgagacccggccgaccagtgaccaaattaaggaatcagtttttaacctgatcggcccttattttgaaggaggcttagtcttagacctatatgcagggaccggggcccttggcattgaggcagtctctcgtggcatggataaagcctacctggttgatgctgacgctaaggcagtcaaatcaatccaaaaaaatatcaccattaccaaggaagaagacaagttctatccgtatcgttcgccagcagccaaggctttaatgacctttaagcacaagcaattggcctttgacctcattttcctagaccctccctaccaagacgaccaaatcattggcgatatcgaggaaatggtcaagcaagaaatggttaagcctggtgccttgattgtctgtgagaccaagtatgactcccaaatgccagagaccattcgagatttaactatttacaagcaaagaaagtatgggaccacccttatcaccatttatgaaaggaaagcttaa

SEQ ID NO: 4884 - protein, 184 aa, Alloiococcus otitidis
MRIIAGKYGGRPLKSEVSDETRPTSDQIKESVFNLIGPYFEGGLVLDLYAGTGALGIEAVSRGMDKAYLVDADAKAVKSIQKNITITKEEDKFYPYRSPAAKALMTFKHKQLAFDLIFLDPPYQDDQIIGDIEEMVKQEMVKPGALIVCETKYDSQMPETIRDLTIYKQRKYGTTLITIYERKA

SEQ ID NO: 4885 - DNA, 411 bp, Alloiococcus otitidis
  CDS (91)..(408)
ccaagacgagtaagaacaagtttagaaagccctcatgaattagagggctttttattatatcagaagtgggctagagaggagtttggcgacatggacaataaagaaagaaagcgccagggcatcattgtgtggttgtacacgcccaagtacttaaaccaattaagtcagtatggaaccttgcactatgtttccaagaagatgaagtatgccctattgtatgtggagaagaagaagctagacaaggtgaagtcccaactcattaaactgcactttgtcagaagtatcgaagactgtcactaccaggacttgacagctgactatagtggcttgttggaagagctagaccaagaggccaaggcaaaaaatgaagaagaaagtggactgaagttgttctcacaattagattattga

SEQ ID NO: 4886 - protein, 106 aa, Alloiococcus otitidis
MDNKERKRQGIIVWLYTPKYLNQLSQYGTLHYVSKKMKYALLYVEKKKLDKVKSQLIKLHFVRSIEDCHYQDLTADYSGLLEELDQEAKAKNEEESGLKLFSQLDY

SEQ ID NO: 4887 - DNA, 288 bp, Alloiococcus otitidis
  CDS (19)..(285)
aaaaggagggcatgtggtgtggatagtgtaaaagtgcaatatacaaaggatattttaatggaagatgccaaccgcatttccaaattaatcgagaaccagcgtcatttgtgtgtttcatgtccagcatttgaagaagtgatcgatacacaattgtttggcttttctaaaaaaattgaattcgccgttcaaatggatctactcccagaagaagacgggcaccaaatgatggctgacttggaaaaacatttaaatgatgtctacaaccatgccgttgaccaagacgagtaa

SEQ ID NO: 4888 - protein, 89 aa, Alloiococcus otitidis
MDSVKVQYTKDILMEDANRISKLIENQRHLCVSCPAFEEVIDTQLFGFSKKIEFAVQMDLLPEEDGHQMMADLEKHLNDVYNHAVDQDE

SEQ ID NO: 4889 - DNA, 1845 bp, Alloiococcus otitidis
  CDS (148)..(1842)
gttggaggaaattgtgtgaaaaaacgagatgatattagaaatatagccattattgcccacgttgaccatggtaaaacgaccctggttaaccaactcttggaacaatccgacaccctagatagccatactgaaattggtgaacgggccatggattccgatgacattgaaaaagaacgcggaattaccattctagcaaagaatacggcggtccagtacggggacaccttgatcaatattttggataccccaggccacgccgattttggtggcgaggtagaacggattatgaaaatggtcgacggggttatattgattgtagatgcctatgaagggaccatgccccagacccggtttgtcttgaaaaaggctttggaacaagacctacaacccattgtggtggtcaataaaattgacaagccaacagcccaaccggaaaaagtggttgatgaagtcttagacctcttgattgaactggaggcagatgaagaccagctggaatttccagtggtttatgcatctgccttaaatggaacctcctctttttcagaccaagctagcgaccaagagcagaccatggatccaatttttcaaaccattcttgacaagatccctgctccaatcgacaacagtgatgaacccttgcaatttcaggtttctcttttggactacaatgactatgttggtcggattgggatcggccgggttttccggggaaccatcagtgttggggacaatgttagcttgtccaagttagatggatcggtcaaaaacttccgggtgaccaagctttttggctactttggcttggaaagacgggagatccagtctgccaaggccggcgacttgattgccgtctctggctttgaagatatcttcgttggcgaaacagttactccaactgaccatgtggaccccctcccagtccttcatattgatgaacccaccttgcagatgaccttcttagccaataactcccctttcgctggtcgggaaggcaagtgggtgacctcctctaaaattgaagaacggctctttacccagctccaaaccgatgtctccttgaaggtagacccaaccgattcaccggatgtctggaaggtttctggcagaggagagctccacttgtccgttctaatcgaaaatatgcgccgggaaggctatgaactccaggtctccaagcctgaagtcattaccaaagaaattgacggggttaagtgtgaaccctttgaacgggttcaaattgactcgcctgaagagtatatgggtaacatcattgaagccctcggacaacgcaagggcgagatgctagacatggtccacactggcaatggccaagtccggattgtcttccaagtgccggcccggggtttgattggctttagtaatgaatttatgtccatgactcacggctacggcatcttaaaccacagttttgatgagtatgccccaatggtcgaaggcaatactggcgaacgtaaaaacggggctttggtttccatggaaaacgggacagcgaccacttacagtattatgaacctagaagaccgggggaccatttttgttgaaccgggtacagaagtttatgaaggcatgatcgttggtatgaataaccgggacaatgacctgaccgttaacatcatcaaggaaaaacaaaagaccaatgtccggtcagcgaccaaagaccaaactagtgtcattaaacgaccgaagattatgtccctagaagaatctttagaatttattaccgatgatgagtatgtggaagtaaccccagaatccatccgactccgaaagaaaattttggacaaaaatactcgagaaaaagcgaacaagcgcaagggttag

SEQ ID NO: 4890 - protein, 565 aa, Alloiococcus otitidis
MDSDDIEKERGITILAKNTAVQYGDTLINILDTPGHADFGGEVERIMKMVDGVILIVDAYEGTMPQTRFVLKKALEQDLQPIVVVNKIDKPTAQPEKVVDEVLDLLIELEADEDQLEFPVVYASALNGTSSFSDQASDQEQTMDPIFQTILDKIPAPIDNSDEPLQFQVSLLDYNDYVGRIGIGRVFRGTISVGDNVSLSKLDGSVKNFRVTKLFGYFGLERREIQSAKAGDLIAVSGFEDIFVGETVTPTDHVDPLPVLHIDEPTLQMTFLANNSPFAGREGKWVTSSKIEERLFTQLQTDVSLKVDPTDSPDVWKVSGRGELHLSVLIENMRREGYELQVSKPEVITKEIDGVKCEPFERVQIDSPEEYMGNIIEALGQRKGEMLDMVHTGNGQVRIVFQVPARGLIGFSNEFMSMTHGYGILNHSFDEYAPMVEGNTGERKNGALVSMENGTATTYSIMNLEDRGTIFVEPGTEVYEGMIVGMNNRDNDLTVNIIKEKQKTNVRSATKDQTSVIKRPKIMSLEESLEFITDDEYVEVTPESIRLRKKILDKNTREKANKRKG

SEQ ID NO: 4891 - DNA, 1845 bp, Alloiococcus otitidis; identical to SEQ ID NO: 4889
  CDS (97)..(1842)

SEQ ID NO: 4892 - protein, 582 aa, Alloiococcus otitidis
MEQSDTLDSHTEIGERAMDSDDIEKERGITILAKNTAVQYGDTLINILDTPGHADFGGEVERIMKMVDGVILIVDAYEGTMPQTRFVLKKALEQDLQPIVVVNKIDKPTAQPEKVVDEVLDLLIELEADEDQLEFPVVYASALNGTSSFSDQASDQEQTMDPIFQTILDKIPAPIDNSDEPLQFQVSLLDYNDYVGRIGIGRVFRGTISVGDNVSLSKLDGSVKNFRVTKLFGYFGLERREIQSAKAGDLIAVSGFEDIFVGETVTPTDHVDPLPVLHIDEPTLQMTFLANNSPFAGREGKWVTSSKIEERLFTQLQTDVSLKVDPTDSPDVWKVSGRGELHLSVLIENMRREGYELQVSKPEVITKEIDGVKCEPFERVQIDSPEEYMGNIIEALGQRKGEMLDMVHTGNGQVRIVFQVPARGLIGFSNEFMSMTHGYGILNHSFDEYAPMVEGNTGERKNGALVSMENGTATTYSIMNLEDRGTIFVEPGTEVYEGMIVGMNNRDNDLTVNIIKEKQKTNVRSATKDQTSVIKRPKIMSLEESLEFITDDEYVEVTPESIRLRKKILDKNTREKANKRKG

SEQ ID NO: 4893 - DNA, 1845 bp, Alloiococcus otitidis; identical to SEQ ID NO: 4889
  CDS (16)..(1842)

SEQ ID NO: 4894 - protein, 609 aa, Alloiococcus otitidis
MKKRDDIRNIAIIAHVDHGKTTLVNQLLEQSDTLDSHTEIGERAMDSDDIEKERGITILAKNTAVQYGDTLINILDTPGHADFGGEVERIMKMVDGVILIVDAYEGTMPQTRFVLKKALEQDLQPIVVVNKIDKPTAQPEKVVDEVLDLLIELEADEDQLEFPVVYASALNGTSSFSDQASDQEQTMDPIFQTILDKIPAPIDNSDEPLQFQVSLLDYNDYVGRIGIGRVFRGTISVGDNVSLSKLDGSVKNFRVTKLFGYFGLERREIQSAKAGDLIAVSGFEDIFVGETVTPTDHVDPLPVLHIDEPTLQMTFLANNSPFAGREGKWVTSSKIEERLFTQLQTDVSLKVDPTDSPDVWKVSGRGELHLSVLIENMRREGYELQVSKPEVITKEIDGVKCEPFERVQIDSPEEYMGNIIEALGQRKGEMLDMVHTGNGQVRIVFQVPARGLIGFSNEFMSMTHGYGILNHSFDEYAPMVEGNTGERKNGALVSMENGTATTYSIMNLEDRGTIFVEPGTEVYEGMIVGMNNRDNDLTVNIIKEKQKTNVRSATKDQTSVIKRPKIMSLEESLEFITDDEYVEVTPESIRLRKKILDKNTREKANKRKG

SEQ ID NO: 4895 - DNA, 819 bp, Alloiococcus otitidis
  CDS (349)..(816)
ataggctgtatagagtttctagagaggtggtcaattgtgacaaatttaaataaagtacatgatctggcgactgcttgggtcaaagaggcaggaagtcaaatcgctagtcaattgaaccaggatttgtcggtggagacgaaaacgggccccaatgacctggtgaccaacttagatgtccaaaccgaaaaattcttgaccgggaagatcagggcaaacttccccaaccataggattgtaagtgaggaaggttttggcgacaagctgagtgacttaaaggggccagtttggtttgttgaccctattgacgggactttaaactttgtcaagcagagggaaaatttctgcatcatgttagctttttatgaagacggggtggggcaattggcttacatctatgacttagtgggggaccgcttttatcatgtcatcaagggccagggtgcctactgcaatgacaatcctattacagggcttttagaccgaagactggaccaaggacttttggcctttaattctaagatcttgatcgactcttctcggaccaaactccaaggtctgctcgaccagaccctaggcttaaggctctatgggtcagctggcatggaggccatggaagttctcatgagccggacggtagcctatattgcctctcacttgaagccatgggattatgctccagcagctgtatttatggctgaaatggggggcaagctaagtgacttccaaggccaagatccagattttctaacggaaagtgagattatcatcgccaacaagctggctcaccaagaaatactggaccacttgcatcaaaaataa

SEQ ID NO: 4896 - protein, 156 aa, Alloiococcus otitidis
MLAFYEDGVGQLAYIYDLVGDRFYHVIKGQGAYCNDNPITGLLDRRLDQGLLAFNSKILIDSSRTKLQGLLDQTLGLRLYGSAGMEAMEVLMSRTVAYIASHLKPWDYAPAAVFMAEMGGKLSDFQGQDPDFLTESEIIIANKLAHQEILDHLHQK

SEQ ID NO: 4897 - DNA, 819 bp, Alloiococcus otitidis; identical to SEQ ID NO: 4895
  CDS (112)..(816)

SEQ ID NO: 4898 - protein, 235 aa, Alloiococcus otitidis
MNQDLSVETKTGPNDLVTNLDVQTEKFLTGKIRANFPNHRIVSEEGFGDKLSDLKGPVWFVDPIDGTLNFVKQRENFCIMLAFYEDGVGQLAYIYDLVGDRFYHVIKGQGAYCNDNPITGLLDRRLDQGLLAFNSKILIDSSRTKLQGLLDQTLGLRLYGSAGMEAMEVLMSRTVAYIASHLKPWDYAPAAVFMAEMGGKLSDFQGQDPDFLTESEIIIANKLAHQEILDHLHQK

SEQ ID NO: 4899 - DNA, 819 bp, Alloiococcus otitidis; identical to SEQ ID NO: 4895
  CDS (37)..(816)

SEQ ID NO: 4900 - protein, 260 aa, Alloiococcus otitidis
MTNLNKVHDLATAWVKEAGSQIASQLNQDLSVETKTGPNDLVTNLDVQTEKFLTGKIRANFPNHRIVSEEGFGDKLSDLKGPVWFVDPIDGTLNFVKQRENFCIMLAFYEDGVGQLAYIYDLVGDRFYHVIKGQGAYCNDNPITGLLDRRLDQGLLAFNSKILIDSSRTKLQGLLDQTLGLRLYGSAGMEAMEVLMSRTVAYIASHLKPWDYAPAAVFMAEMGGKLSDFQGQDPDFLTESEIIIANKLAHQEILDHLHQK

SEQ ID NO: 4901 - DNA, 1452 bp, Alloiococcus otitidis
  CDS (40)..(1449)
atccagaccagacaaaaggaaaggacaaggtgttcattaatggttgttgcagactttactgaagaattggatacagtagtcatcgggtcaggacccggcggttacgttgcagctatccgggctgcccaagaaggtcaagatgttactgtcatcgagcgagaattcattggcggggtgtgcttaaacgtcggatgtatcccatctaaagccctcatcaatgctggccacaaataccacgatgcggttgattctaaagacttaggtattacaactggagacgttgagattgactttaccaagactcaaaaatggaaagacaaccgagtcgttaaacgcttgaccaagggtgttgaaggattactcaagaaaaatggtgtcaatatcatcatgggcgaagcttatatcaatggccctaacaagttaagtgtttcgactgaagatggtaaacaatcttacagcttcaacaacttgattgtcgcaacaggatcttccccaattgaaattcctggtttcagcttcaaatctgaccgggtattggactcaactggtgctttaaacttggaagaaattccagaaaaactagtagttgttggtgggggttacattggctgtgaattagctggtgcttatgccaactttggtactgaagtgactatcttagaaggtgcagacaccattcttggcggttttgacaaagacatggttaaaattgtcgaacgcgacttcaagaaaaacaagggcgttgatgtcgtgactaaagctaaagcaaaatcagctgaagaaacagattcaggtgtcaaagtcacttacgaagccaaagacgaagaaaaaaccatcgaagctgactatgttcttgtcacagttggccgtacccctaacactgatgaacttggcttagaagctgcaggcgttgaattggacgaccgcaacctagtcaaagtagacaaacaaggccgaactagtgtagactccatttgggctattggggacattgtggcaggtgctgctcttgcccacaaggcttcttatgaagcaaaagttgctgctgaagctatctcaggcaaaaaagtcgaagtggactacaaggcaatgcctgctgttgcctttacagaccctgaagttgctattgctggttactctgagcaagaagccaaagatgctggcctagacgttaaagcaactaaattcccaatcggtgggaacggtcgtgccctatctctcaatgcgactgatggcttcatccgcttgatcaccaccaaagaagacaacgtcatcgttggtggccaagtagcaagtgttggggcttcagacatcattgcggaaattgccttggcaattgaatctggcatgaacttagaagatattacccttactgttcacgcccacccaacccttcctgaagctgtcatggatactgctgaagcagccctagaccaagcaatccacatctaa

SEQ ID NO: 4902 - protein, 470 aa, Alloiococcus otitidis
MVVADFTEELDTVVIGSGPGGYVAAIRAAQEGQDVTVIEREFIGGVCLNVGCIPSKALINAGHKYHDAVDSKDLGITTGDVEIDFTKTQKWKDNRVVKRLTKGVEGLLKKNGVNIIMGEAYINGPNKLSVSTEDGKQSYSFNNLIVATGSSPIEIPGFSFKSDRVLDSTGALNLEEIPEKLVVVGGGYIGCELAGAYANFGTEVTILEGADTILGGFDKDMVKIVERDFKKNKGVDVVTKAKAKSAEETDSGVKVTYEAKDEEKTIEADYVLVTVGRTPNTDELGLEAAGVELDDRNLVKVDKQGRTSVDSIWAIGDIVAGAALAHKASYEAKVAAEAISGKKVEVDYKAMPAVAFTDPEVAIAGYSEQEAKDAGLDVKATKFPIGGNGRALSLNATDGFIRLITTKEDNVIVGGQVASVGASDIIAEIALAIESGMNLEDITLTVHAHPTLPEAVMDTAEAALDQAIHI

SEQ ID NO: 4903 - DNA, 1371 bp, Alloiococcus otitidis
  CDS (7)..(1368)
gtcggaatggtttcctcattggcaagggccattccctctttgcttgagaccacatccaatcacacacgtttaaaaggagagcgatcaaatatggcattcacatttaaactacctgacgtcggcgaagggatggctgaaggtgaaattgtcagctggttagtcgaaaaaggggataccgttgaagaaggtgactcggtagctgaagtccaaaacgataagtcagtggaagagttggcatcaccagttgacgggactatccaagaatttatcgttgaagctggaactttagtcggagttggtgaccctatccttaaaattgacgatgggtcagaagacgatgaggaagaagaaagcagtcaagaccaggcagaccaagacagccaagaaaaagaggaagatcaagaagccagtcagcccgctgctagtggtggggtagttgaaaaagctgaccctaacaagcaagtcctagccatgccatctgttcgacaatatgctagagacaaagacgtcgacatcagccaagtccaagcaactggtaagggtggacgggtcactcgagaagatatagacaactttgacggctctgctagcccacaagcccaagatcaaacaggtcaagggcaaaccattagccaagaagtcaaagcttactcttcaccatttgaagaccaagaaactcgcgaaccaatgtccatgacacgccgggcaatcgcaaatggtatgtcttacagttccaataccatcccatccttcgccctctttgaccaagccgatgcgacaaaactcattgcccaccgtagtcggtttaaagaagaggctgccgaacaaggggtaaaattgacctacttgccttatattgttaaggccttggtatcaaccttgaaaaaatatcccgtattaaatacatctttagatgacactacagatgaaattattcacaaaaactattataatataggtatagccaccgataccccaagtggattattcgttccggttattcgagatgcagataaaaaatcaatgtatgaaattgctgacgaaattgaggagaaatctgaaaaagctaaggctggcaaattaagttcagatgacatgtccggtggctcaatctcagttaccaacattggttccgttaacggtggtttcttcacaccagtcatcaaccaccccgaaactgctatcttaggaattggccgaattaagaaaaaaccggtagtcgatgaaaatgatgaattggcagttgcccctgttcaagaattgtcattgatcattgaccaccgcgtgatcgatggggctgatggacaaagagccctaaaccacttgaaacgtgtcattgaagatcctgacctattactcatggaaggatag

SEQ ID NO: 4904 - protein, 454 aa, Alloiococcus otitidis
MVSSLARAIPSLLETTSNHTRLKGERSNMAFTFKLPDVGEGMAEGEIVSWLVEKGDTVEEGDSVAEVQNDKSVEELASPVDGTIQEFIVEAGTLVGVGDPILKIDDGSEDDEEEESSQDQADQDSQEKEEDQEASQPAASGGVVEKADPNKQVLAMPSVRQYARDKDVDISQVQATGKGGRVTREDIDNFDGSASPQAQDQTGQGQTISQEVKAYSSPFEDQETREPMSMTRRAIANGMSYSSNTIPSFALFDQADATKLIAHRSRFKEEAAEQGVKLTYLPYIVKALVSTLKKYPVLNTSLDDTTDEIIHKNYYNIGIATDTPSGLFVPVIRDADKKSMYEIADEIEEKSEKAKAGKLSSDDMSGGSISVTNIGSVNGGFFTPVINHPETAILGIGRIKKKPVVDENDELAVAPVQELSLIIDHRVIDGADGQRALNHLKRVIEDPDLLLMEG

SEQ ID NO: 4905 - DNA, 990 bp, Alloiococcus otitidis
  CDS (7)..(987)
ttaaccatggctagtaatcaattgaccatgatcaaggcgattacccaagcccttgaccaagagatggaacaaaatgacaagatgattatctttggtgaagacgtcggtaaaaacggcggggtcttccgggcaactcaaggactctttgacaaatatggtgaagaccgggttaacgatactcctcttgctgaatctggtatagggggcatggcttttggtttagccctacaaggctttacaccagttatggaaatccaattctttggtttcgtgtttgagaccatggatgaaatttctggtcaaattgcccgccaacgttaccgtatggggggagacattaacttcccagtcaccattcgttcaccatttggcggaggtgtccacacgccagaaatgcacgcggactctctagaaggcttgatggctcagtctcctggtttgaaagtcgttattccatccaacccttatgacgcaaaaggccttctaaccgcagccttacgcgaccctgacccagttgttttcctcgaacacatgaaactttaccggtctttccgccaagaagtgccggaagaacaatatgaaatcgaacttggcaaggccaatgtagccaaagaaggaagcgatgtgacagttgccgcatatggatacatggtccgcgaagccttgaaggcagctgaagaattagagaaagaagatatttcggttgaagtcattgacttgcgaactgtttcaccggtagattacgaaaccattaccgagtcaattgaaaaaaccaaccactttgtctttgtccaagaagcccaaagacaagcaggagtgggcggtcaagtgatcgcagaagttgccttgcggtcaatcctatcacttgaagcacccctcaaatatgtttctgccccagataccgtcttcccatttggcgaaattgaaaatgaatggttgcctggtgcagatgacattattgaagcagtgaaagaatccattaacttctaa

SEQ ID NO: 4906 - protein, 327 aa, Alloiococcus otitidis
MASNQLTMIKAITQALDQEMEQNDKMIIFGEDVGKNGGVFRATQGLFDKYGEDRVNDTPLAESGIGGMAFGLALQGFTPVMEIQFFGFVFETMDEISGQIARQRYRMGGDINFPVTIRSPFGGGVHTPEMHADSLEGLMAQSPGLKVVIPSNPYDAKGLLTAALRDPDPVVFLEHMKLYRSFRQEVPEEQYEIELGKANVAKEGSDVTVAAYGYMVREALKAAEELEKEDISVEVIDLRTVSPVDYETITESIEKTNHFVFVQEAQRQAGVGGQVIAEVALRSILSLEAPLKYVSAPDTVFPFGEIENEWLPGADDIIEAVKESINF

SEQ ID NO: 4907 - DNA, 1206 bp, Alloiococcus otitidis
  CDS (22)..(1203)
gcctgtattacaattaccataatgagaggaatgggattatttatggcgaaagaacaaagcgatcaacgtgtgcaagaaagctcagttgaatctttgaactcagaatcaacacagccagttgattatgaggcaatcttaaataattacaaggcaactttcccaactgttcaaatattggataaggaaggggaagttgtaaatgaggatattatgccagacttgtcagatgaccaattagttgacttaatggagaaaatggtctggtcaagaaccttatttgaccggtctatcgccttgtcaaaacaagggcgcctaggcttttatgccccaagtaagggccaagaagcttcccaagtagcttcccactatgcttttgaaaaacaagactggctttttcctggttaccgggatgtcccacaattgattctccacggcttacctatttccaaagcctttttatggtctagaggccatatggaagggaaccggtatgatgacctaagagctatgccaccccaaattataatcggtgcccaaatggtacaagctatggggaacgcagttggtgtcaagttaaaaggcgaagaaaatgttgtcacctttgcctacaccggtgacggcggatcttcacaaggggacacttacgaagcgattaacttcgcttcccgctacaaggctccagctgtcttttatattcaaaacaatggttacgctatttcaaccccaagacataagcaaaccgctgctgagaccctagcccaaaaagcagcagctgctggtattccgggtgttcaagttgacggaatggacccactcgccgtttatgcagtttctaaacaagcaagagaatgggcagcagctggcaatggtcccgtcttgattgaaacactaacttcccgtatgggggcccactctacttcaggtgacgacccttccatctaccgtgaccaagagtcttttgactattgggatgaccgtgacccaatcaaacgcttcaaagcatatttagaagctaaaggtttatgggacgacgaaaaacatgaagaagtcgtcgaaaaagccaaagaagaaatcaagcaggcagccaaagaatctgattcaactccagacatgacgattactggcttacttgaagcgatgtacgaacaccaacctgctaatatcaaagaacaaatcaaaaaataccaagagaaggagagtaattaa

SEQ ID NO: 4908 - protein, 394 aa, Alloiococcus otitidis
MRGMGLFMAKEQSDQRVQESSVESLNSESTQPVDYEAILNNYKATFPTVQILDKEGEVVNEDIMPDLSDDQLVDLMEKMVWSRTLFDRSIALSKQGRLGFYAPSKGQEASQVASHYAFEKQDWLFPGYRDVPQLILHGLPISKAFLWSRGHMEGNRYDDLRAMPPQIIIGAQMVQAMGNAVGVKLKGEENVVTFAYTGDGGSSQGDTYEAINFASRYKAPAVFYIQNNGYAISTPRHKQTAAETLAQKAAAAGIPGVQVDGMDPLAVYAVSKQAREWAAAGNGPVLIETLTSRMGAHSTSGDDPSIYRDQESFDYWDDRDPIKRFKAYLEAKGLWDDEKHEEVVEKAKEEIKQAAKESDSTPDMTITGLLEAMYEHQPANIKEQIKKYQEKESN

SEQ ID NO: 4909 - DNA, 609 bp, Alloiococcus otitidis
  CDS (46)..(606)
tttttatcttattgctatactaaactattgattaggagtggtaaaatgatcacaatgaaagatattatccgggaaggtcaccccaccttacgaaaggttgctgaagaagttacctttcctctcgatgacgctagcaagcaaacggctcaagatatgttagaatttgtcaagaacagtcaagaccctgagcttgcggaaaaatacgatcttagacccggggttgggatagcagcccctcagatcgatatctccaagcgttttatcgctgtctacttgtctgaagaagaaaatgacggccaggaatttagccggattatgtttaaccctaaaattattagccattctgctggcaagacggccctaccaactggtgaaggttgcttgtcagttgaccgcaaagtagcgggaatcgtgccccgggctgctcgggttaaaatccagtattttgaccaagatggccagaagcatgaagaacgcttgcgcaactacccagctattgtggttcaacatgaaatcgaccacttaaatggcgttctcttctttgaccggattgatcccgataaccctctggccctaccagatgacgtggaattattaggggttaactaa

SEQ ID NO: 4910 - protein, 187 aa, Alloiococcus otitidis
MITMKDIIREGHPTLRKVAEEVTFPLDDASKQTAQDMLEFVKNSQDPELAEKYDLRPGVGIAAPQIDISKRFIAVYLSEEENDGQEFSRIMFNPKIISHSAGKTALPTGEGCLSVDRKVAGIVPRAARVKIQYFDQDGQKHEERLRNYPAIVVQHEIDHLNGVLFFDRIDPDNPLALPDDVELLGVN

SEQ ID NO: 4911 - DNA, 609 bp, Alloiococcus otitidis; identical to SEQ ID NO: 4909
  CDS (28)..(606)

SEQ ID NO: 4912 - protein, 193 aa, Alloiococcus otitidis
MIRSGKMITMKDIIREGHPTLRKVAEEVTFPLDDASKQTAQDMLEFVKNSQDPELAEKYDLRPGVGIAAPQIDISKRFIAVYLSEEENDGQEFSRIMFNPKIISHSAGKTALPTGEGCLSVDRKVAGIVPRAARVKIQYFDQDGQKHEERLRNYPAIVVQHEIDHLNGVLFFDRIDPDNPLALPDDVELLGVN

SEQ ID NO: 4913 - DNA, 351 bp, Alloiococcus otitidis
  CDS (94)..(348)
ggatctagctgttttaagtcatgggcattgacgaaaatatccgtatcagattcaataatccccatttcttgggccacttcaacggagttgttcatggaccgaccaaagactgcaattttccgtccggtttggtgggcggcttggaccacctggttaatccgagaaacattagaagcgaaggtggcaaaaataatccgactattaatattttgcaaaagttttaggatggtttcccccactacttgttctgactgggtaaagccggaaacctcagcgttggtagaatcagataggagggccaggacaccttcttcaccgatacgagccatcttgtggaggttggcgcgttga

SEQ ID NO: 4914 - protein, 85 aa, Alloiococcus otitidis
MDRPKTAIFRPVWWAAWTTWLIRETLEAKVAKIIRLLIFCKSFRMVSPTTCSDWVKPETSALVESDRRARTPSSPIRAILWRLAR

SEQ ID NO: 4915 - DNA, 1680 bp, Alloiococcus otitidis
  CDS (7)..(1677)
gacaagatgacagtcgacataaataacaatgaagttgccatatttggtatcggaggcttagatgaaattggtaaaaacacctatggcgtccaatttcaagacgaaatcatcatcattgatgcagggatcaagttcccagaagacagtttgctggggatcgactatgtgattcccgactacacctacttggtcgaaaaccaagataagatcaaggggctttttattacccactcccacgaagaccacgttgggggcatcccctatttactaaaagagatcaatgtcccgatttatgccggtcacctagcttctgctatgatccgcaacaaactcagcgagcacaaactcttgcggtcaactgaaattcacgaaatcgatgaagatacagttattaagttggacaagacatcagttggcttctttaaaacgacccactctgtccctgaatcatacgggattgttgtcaaaacacctaacggcaacattgtccaaacgggtgacttcaaatttgactttaccccagttggtcaacgcgccaacctccacaagatggctcgtatcggtgaagaaggtgtcctggccctcctatctgattctaccaacgctgaggtttccggctttacccagtcagaacaagtagtgggggaaaccatcctaaaacttttgcaaaatattaatagtcggattatttttgccaccttcgcttctaatgtttctcggattaaccaggtggtccaagccgcccaccaaaccggacggaaaattgcagtctttggtcggtccatgaacaactccgttgaagtggcccaagaaatggggattattgaatctgatacggatattttcgtcaatgcccatgacttaaaacagctagatcctcaagagactttaatcctctgtacagggtctcagggtgaacccatggctgctttgagtcgaattgccaatggaagccacaggcaaatttccatccagccaggtgataccgtggtcttctcttcctcgccgattccaggcaacaccacttccgttaataatgtcatcaaccaattgatggaggctggcgctgaggttatccacggcgaggtcaacaccatccacacttccggtcacggtagccaggaagagcaaaaattgatgctcagtctcatgcgaccgaaattcttcattcctatccacggagagcaccggatgcaaaaaatccacgccaacttagctatccaaaccggagtagaaaaaaacaactgcttcattttggataacggtcaggtcctagccatgaccgaagattcagcccgcttagctggtgatttcccagccgggtcagtttacatcgacggcagtgggatcggggacattggcagtgtggtattaagagaccggaagaacctatctgataacggcttagttgtagtcgtcgcaaccatcgatacccaaaaacgacaggttattgctggaccggatatcgtctcccggggctttatttacatgcgggagtcagaagatttgatcaagcaggcccaaagagtcgcctaccagtccatccaagactccttccaatacaagcatgtcaatgaatataagctccgcaataacctgacagaagccgttaaatccttcttatttgaagaaaccgaacggaaacccattatcctacctgttgtattaaccagtaattaa

SEQ ID NO: 4916 - protein, 557 aa, Alloiococcus otitidis
MTVDINNNEVAIFGIGGLDEIGKNTYGVQFQDEIIIIDAGIKFPEDSLLGIDYVIPDYTYLVENQDKIKGLFITHSHEDHVGGIPYLLKEINVPIYAGHLASAMIRNKLSEHKLLRSTEIHEIDEDTVIKLDKTSVGFFKTTHSVPESYGIVVKTPNGNIVQTGDFKFDFTPVGQRANLHKMARIGEEGVLALLSDSTNAEVSGFTQSEQVVGETILKLLQNINSRIIFATFASNVSRINQVVQAAHQTGRKIAVFGRSMNNSVEVAQEMGIIESDTDIFVNAHDLKQLDPQETLILCTGSQGEPMAALSRIANGSHRQISIQPGDTVVFSSSPIPGNTTSVNNVINQLMEAGAEVIHGEVNTIHTSGHGSQEEQKLMLSLMRPKFFIPIHGEHRMQKIHANLAIQTGVEKNNCFILDNGQVLAMTEDSARLAGDFPAGSVYIDGSGIGDIGSVVLRDRKNLSDNGLVVVVATIDTQKRQVIAGPDIVSRGFIYMRESEDLIKQAQRVAYQSIQDSFQYKHVNEYKLRNNLTEAVKSFLFEETERKPIILPVVLTSN

SEQ ID NO: 4917 - DNA, 648 bp, Alloiococcus otitidis
  CDS (16)..(645)
atttggaggaagctaatgattaaagtaatgttagtcgatgaccatcccatggtccgactgggtttatcgtcttatttttccatccagagtgatatggaagtggtcggtgaggctgacaatggacaaacaggcgtggagatggccttaacccaaaaaccggatattattttgatggacttggttatggatgggatggatggcatccaagccaccaaggctataatgacagaatggccccaagccaaaattattatcctaaccagctttattgatgatgagaaggtcttcccggccatggagtccggggcaagtggctatttgctcaaaacttcttctgctgctgaaatagccaatgctatccgggccattgacaaaggggatagcgtttttgaagaagaggtgacccagaaagttattcaaaggcacagccatgaccaggcaagccagcctcatgatgacttgaccaaaagagagctggaaatcctttcttatattgctaagggctatagtaaccaggaaatttctgatgcttgctttattaccttgaagacggttaaaactcatgtttccaatatcttgtctaagttagatgtggtggaccgaacccaggctgctatctacgcctaccgccatggtttagctgagtaa

SEQ ID NO: 4918 - protein, 210 aa, Alloiococcus otitidis
MIKVMLVDDHPMVRLGLSSYFSIQSDMEVVGEADNGQTGVEMALTQKPDIILMDLVMDGMDGIQATKAIMTEWPQAKIIILTSFIDDEKVFPAMESGASGYLLKTSSAAEIANAIRAIDKGDSVFEEEVTQKVIQRHSHDQASQPHDDLTKRELEILSYIAKGYSNQEISDACFITLKTVKTHVSNILSKLDVVDRTQAAIYAYRHGLAE

SEQ ID NO: 4919 - DNA, 1074 bp, Alloiococcus otitidis
  CDS (13)..(1071)
ggtggtcttcttatgaaagatcatatcaaaagacttatcttaaccaatatcttggtcatcatcatcttgattttggctatagcggtcactctcagatactttacggaatatagcctagtgggtttagtaatagatgactattactcctttccctacttaatggtcttgcttattttttcctttattttgaccctggctttttacgggatccccacccttttaaaataccggcgagaccgaaaaattgaacaagccttgaagtcgctcattgaaggaaattattcttccaacttaatagcccggatgacttatgcccccaaggctcagatcagccccaaaattgaccaggcctttttacagctccagaaaaaattgatcagcatttccaatgaaatccttttaactaaggaagagcaggcccagttggggacggagacccgggaagaaattttggaggctgaacgcaaacggattgcccgggagctccacgattcagtcagccagcacctttttgcctcttctatgattttatcggctataaatgagcaagacctcttggctcaagactatccggctatcagccagcagttggctaatgtggagcagataattaacaactctcaattagaaatgcgggccctcttgctgcacttgcggcctgtccaactcaacaataagtctctaaaagaaggcatcagtcacttattaaaagagttagccagtaaggttaagatggctatcaagcaagatttagacgaggtgaccttacccaccagtatagaagatgacctcttccgagtggtccaagaacttttatctaatgtcttaagacactctcaagctgaggaagtggaagtctatctcaaagaaaggcctcaaaagattgtcttaagggtagtggatgatggcctaggctttgacctagacgaggaccggtctggctcttatggcttggctaatattgaggagagaatttctggcatggggggcaatgtcaagattgtctccctaaaaaatcaagggaccagtgtggagataacgattccgatagatttggaggaagctaatgattaa

SEQ ID NO: 4920 - protein, 353 aa, Alloiococcus otitidis
MKDHIKRLILTNILVIIILILAIAVTLRYFTEYSLVGLVIDDYYSFPYLMVLLIFSFILTLAFYGIPTLLKYRRDRKIEQALKSLIEGNYSSNLIARMTYAPKAQISPKIDQAFLQLQKKLISISNEILLTKEEQAQLGTETREEILEAERKRIARELHDSVSQHLFASSMILSAINEQDLLAQDYPAISQQLANVEQIINNSQLEMRALLLHLRPVQLNNKSLKEGISHLLKELASKVKMAIKQDLDEVTLPTSIEDDLFRVVQELLSNVLRHSQAEEVEVYLKERPQKIVLRVVDDGLGFDLDEDRSGSYGLANIEERISGMGGNVKIVSLKNQGTSVEITIPIDLEEAND

SEQ ID NO: 4921 - DNA, 762 bp, Alloiococcus otitidis
  CDS (19)..(759)
agaataggagccaatctcatggacagaataaataaagatgtcgtcattttcatcctaatattggtcctagtcgctagcatgggccttgagcttgcggccagtcccttccccttgatattgatcctagcagggatcgtgggtttatacctaacccaaagcaaggggaaagagtcatatagtttaatgttcatcatgagcttggctgccatcagcctggccttgctcaatacctattcggcttggattatcttagccatccttgttatcattatttttactcggaaccagtctttctttcaatcgctgaaagatagcttgtttgaaacaaatttttcctggacgggtagtgaatatatctcagtaaaatttgaccaagaccacgaaagatccatcaagcggacacggcgtaagtggattggtcgcgaaagcgatgaaaatttggtttatcaatgggaagatattgtctataccaagtttgcaggggacaccttcattgatttgggcaacaccatcatgcccaaggatcaaaatgttatactaatccgcaaggtttttggggacttgaagattttgattccccaagaggtcgctgtttctttggacattagtattttgctaggcaaggtacggattggggaggacgagttaaccttaaacaatgaggtggtcacttaccggtcagaccattttgaccagaccgaccgcaagttaaaaattatgacaaccagtatttttggagatgttgaggtggtcttcttatga

SEQ ID NO: 4922 - protein, 247 aa, Alloiococcus otitidis
MDRINKDVVIFILILVLVASMGLELAASPFPLILILAGIVGLYLTQSKGKESYSLMFIMSLAAISLALLNTYSAWIILAILVIIIFTRNQSFFQSLKDSLFETNFSWTGSEYISVKFDQDHERSIKRTRRKWIGRESDENLVYQWEDIVYTKFAGDTFIDLGNTIMPKDQNVILIRKVFGDLKILIPQEVAVSLDISILLGKVRIGEDELTLNNEVVTYRSDHFDQTDRKLKIMTTSIFGDVEVVFL

SEQ ID NO: 4923 - DNA, 312 bp, Alloiococcus otitidis
  CDS (16)..(309)
tggacattaaaatttatgtggatactgatgatgacatccggattatcaggcggattaagcgggacatgcaagaccggggtcggagcttggactccatcattgaccagtatcttagtgtggtcaagcaaatgcatgaacaatttattgaaccctctaaacgctatgccgatattatcatcccagaagggtcgcaaaaccaggtggctattgacttggttacgactaaaattcaaaatatttttgatgaaagacaataaaagagcttggaaccaggtaatttctttacattttaaggagaccatggtatcttag

SEQ ID NO: 4924 - protein, 98 aa, Alloiococcus otitidis
MWILMMTSGLSGGLSGTCKTGVGAWTPSLTSILVWSSKCMNNLLNPLNAMPILSSQKGRKTRWLLTWLRLKFKIFLMKDNKRAWNQVISLHFKETMVS

SEQ ID NO: 4925 - DNA, 702 bp, Alloiococcus otitidis
  CDS (280)..(699)
atagaaaagccacaaaacattgggcctcggtccaatgttttatggtgtagggatgaaggtgaaaaaatggatgaaaaggaaaagcccttggtcataggggtaaccggtgggtcgggcagtgggaaaaccagtgttaccaaggcgatttacaaccacttccccggtaagtccatcatgatcttagagcatgattcttattacaaggaccagagtcatttggacttccaagaccgactcaagactaattatgaccaccccctagcctttgatacagaactcatggtcgatcaactcaaggccctcttaaataaccaggctgtcgatgtacctgtctatgactataaacgtcacaccaggagttcagaggtcatccaccaggagcctaaggaagttattattgtggaaggtatcatggttttagtggaccaagccttgcgtaacttgatggacattaaaatttatgtggatactgatgatgacatccggattatcaggcggattaagcgggacatgcaagaccggggtcggagcttggactccatcattgaccagtatcttagtgtggtcaagcaaatgcatgaacaatttattgaaccctctaaacgctatgccgatattatcatcccagaagggtcgcaaaaccaggtggctattgacttggttacgactaaaattcaaaatatttttgatgaaagacaataa

SEQ ID NO: 4926 - protein, 140 aa, Alloiococcus otitidis
MVDQLKALLNNQAVDVPVYDYKRHTRSSEVIHQEPKEVIIVEGIMVLVDQALRNLMDIKIYVDTDDDIRIIRRIKRDMQDRGRSLDSIIDQYLSVVKQMHEQFIEPSKRYADIIIPEGSQNQVAIDLVTTKIQNIFDERQ

SEQ ID NO: 4927 - DNA, 702 bp, Alloiococcus otitidis; identical to SEQ ID NO: 4925
  CDS (67)..(699)

SEQ ID NO: 4928 - protein, 211 aa, Alloiococcus otitidis
MDEKEKPLVIGVTGGSGSGKTSVTKAIYNHFPGKSIMILEHDSYYKDQSHLDFQDRLKTNYDHPLAFDTELMVDQLKALLNNQAVDVPVYDYKRHTRSSEVIHQEPKEVIIVEGIMVLVDQALRNLMDIKIYVDTDDDIRIIRRIKRDMQDRGRSLDSIIDQYLSVVKQMHEQFIEPSKRYADIIIPEGSQNQVAIDLVTTKIQNIFDERQ

SEQ ID NO: 4929 - DNA, 1146 bp, Alloiococcus otitidis
  CDS (43)..(1143)
gttatggtaaagaatggttcggataggactgtcaaaaaaatagtgaccatcaccttatcggtcttggtcgtccttttgcttgtttttttggtatcaggctacttttttgtcaattcagcccttggacccaaggatgaaacaagtgatgaagttattgaagtggaaatcccccaggggacttcccggtccaatattgcctctattttggaggaagaaggggtcattgacagtgcctttgtgtataatacttatttaagaatgaatgatgagcaagatttccaggctgggacttatgaaatgtcaccgtctatgtctttaaaagagattacggactatctccaagagggtgggcaaccgattggggttgaaacagcaaccttcaatgtccctgagggctatatgttagagcaatttgctgaaatcatcggcaatgaaacccagtacacagaagaggaatttatggacctagtccaggatgaagactttatccaaggccaagctgaaaattaccctgacctcttaggggagacggctgaccgggatgatacccggtataagttggaaggttatctctatccggctacttatgagtacactgaagaggactcactggagaccatcgttggccgaatgattagccaaatgaatgccgttgtggaacctcacctgagtgatattgaagcatctgactttaccgtccatgaaatccttaccctggcttcctttattgaaagggagggaatcacggatgaggaccggcaagtaatctccggtgtcttccacaaccgcttggacctggggatgatgctgcaaaccgatgtcagtgtcacctatgccctaggacagcaccaagagcggattagttatgatgacttagaagttgattcagcctacaatacctaccagcatactggactgggacctgggccagttaacagcccttctgccaattccattgatgcagctgtaaacccagttgaaacagactatctttacttcctagctgatttggaaaccaaggaagtctacttctcagagacctatgaacaacacttggaataccaaaaccaatacttgagagacaatggggatggttcagaagaaggccaagagactgaagaaactgaggcagaaccagaagaatag

SEQ ID NO: 4930 - protein, 367 aa, Alloiococcus otitidis
MTITLSVLVVLLLVFLVSGYFFVNSALGPKDETSDEVIEVEIPQGTSRSNIASILEEEGVIDSAFVYNTYLRMNDEQDFQAGTYEMSPSMSLKEITDYLQEGGQPIGVETATFNVPEGYMLEQFAEIIGNETQYTEEEFMDLVQDEDFIQGQAENYPDLLGETADRDDTRYKLEGYLYPATYEYTEEDSLETIVGRMISQMNAVVEPHLSDIEASDFTVHEILTLASFIEREGITDEDRQVISGVFHNRLDLGMMLQTDVSVTYALGQHQERISYDDLEVDSAYNTYQHTGLGPGPVNSPSANSIDAAVNPVETDYLYFLADLETKEVYFSETYEQHLEYQNQYLRDNGDGSEEGQETEETEAEPEE

SEQ ID NO: 4931 - DNA, 1146 bp, Alloiococcus otitidis; identical to SEQ ID NO: 4929
  CDS (4)..(1143)

SEQ ID NO: 4932 - protein, 380 aa, Alloiococcus otitidis
MVKNGSDRTVKKIVTITLSVLVVLLLVFLVSGYFFVNSALGPKDETSDEVIEVEIPQGTSRSNIASILEEEGVIDSAFVYNTYLRMNDEQDFQAGTYEMSPSMSLKEITDYLQEGGQPIGVETATFNVPEGYMLEQFAEIIGNETQYTEEEFMDLVQDEDFIQGQAENYPDLLGETADRDDTRYKLEGYLYPATYEYTEEDSLETIVGRMISQMNAVVEPHLSDIEASDFTVHEILTLASFIEREGITDEDRQVISGVFHNRLDLGMMLQTDVSVTYALGQHQERISYDDLEVDSAYNTYQHTGLGPGPVNSPSANSIDAAVNPVETDYLYFLADLETKEVYFSETYEQHLEYQNQYLRDNGDGSEEGQETEETEAEPEE

SEQ ID NO: 4933 - DNA, 1191 bp, Alloiococcus otitidis
  CDS (55)..(1188)
aagattagatcagggagtgttcttatgccagagataaattcgaccattgcatccatgtccattccacaaactaggtacttttctaataaggctagtgactatgatgatgccgtcaacctcacacttggagttcccgactttgacaccgacccccttattaagcaagctctagtcgatgcctttgttgacaagaagtccctgaaatattcccacaatgcgggtttaattgaactgagacaggccattagcgactattacttcaacaaataccaggtccactttgaccctgaagaccaaatcattgtgactgctggaggaagtgaagccattgactcctctttaagaactattttggaaaagggcgaccaagtcattatcccccaaccagcctatcctgcctaccaggcaattgtgaccatgttaggcggtgaggtcatcccaatcgacacctcagagactaactttgtcctcagcccacaacaagtagaggaaaaaatcactccaaaaaccaaagctatcatcttaaactatccgaccaaccccactggtgtgtctgtaaatcaagaccaggcccaagccttggtcaaggtcatcaaagaccatgatattttcctcttgagcgatgaaatttatggtgaaaacagtttgacccaagaccatgtcagcttcagtcaatttcctgaaatcaaggaccaggcaattatcattaatggcctatccaagtctcatgccatgaccggctggcgactcggttacctcttaagttctaaaaaacttacccagtccatcctcatcccccacctcaacaatactatctgtgccagccttcctagccaatacgctggtctggctgccctcaaacatggcctccatattcctcaaaaaatgaaccaggcctaccgggagcgactagcatacctggttcagcgcttggataagatgggcctcgactatagcaaatcccaaggaagcttttacatcttcccttcaattaagtcctatgaccccaatgcctttaacttttgcctaaacttactagaagaccagcatcttgctgtggttcctggctctgcttttggtcaagctggcgaaggctatatccgaatttcctttgccacttcccttgaccaacttgaagaagggatggaccggctagaaacattcctgtccacttactctactggagattag

SEQ ID NO: 4934 - protein, 378 aa, Alloiococcus otitidis
MSIPQTRYFSNKASDYDDAVNLTLGVPDFDTDPLIKQALVDAFVDKKSLKYSHNAGLIELRQAISDYYFNKYQVHFDPEDQIIVTAGGSEAIDSSLRTILEKGDQVIIPQPAYPAYQAIVTMLGGEVIPIDTSETNFVLSPQQVEEKITPKTKAIILNYPTNPTGVSVNQDQAQALVKVIKDHDIFLLSDEIYGENSLTQDHVSFSQFPEIKDQAIIINGLSKSHAMTGWRLGYLLSSKKLTQSILIPHLNNTICASLPSQYAGLAALKHGLHIPQKMNQAYRERLAYLVQRLDKMGLDYSKSQGSFYIFPSIKSYDPNAFNFCLNLLEDQHLAVVPGSAFGQAGEGYIRISFATSLDQLEEGMDRLETFLSTYSTGD

SEQ ID NO: 4935 - DNA, 1191 bp, Alloiococcus otitidis; identical to SEQ ID NO: 4933
  CDS (25)..(1188)

SEQ ID NO: 4936 - protein, 388 aa, Alloiococcus otitidis
MPEINSTIASMSIPQTRYFSNKASDYDDAVNLTLGVPDFDTDPLIKQALVDAFVDKKSLKYSHNAGLIELRQAISDYYFNKYQVHFDPEDQIIVTAGGSEAIDSSLRTILEKGDQVIIPQPAYPAYQAIVTMLGGEVIPIDTSETNFVLSPQQVEEKITPKTKAIILNYPTNPTGVSVNQDQAQALVKVIKDHDIFLLSDEIYGENSLTQDHVSFSQFPEIKDQAIIINGLSKSHAMTGWRLGYLLSSKKLTQSILIPHLNNTICASLPSQYAGLAALKHGLHIPQKMNQAYRERLAYLVQRLDKMGLDYSKSQGSFYIFPSIKSYDPNAFNFCLNLLEDQHLAVVPGSAFGQAGEGYIRISFATSLDQLEEGMDRLETFLSTYSTGD

SEQ ID NO: 4937 - DNA, 699 bp, Alloiococcus otitidis
  CDS (55)..(696)
attttatcggtctccatttccacttggggttcccaggtccaagatccaagtgtgatgcttgaaacggctcagttggttttagactgggcccatgaccaagagattccagtccagttcttaaacatgggtggaggctttagcattcagtatcaggaagaggatgtggcttttgacgtccaacccggcatcgccaaactagctggggctattatggactactgccaggaaaaagattaccagctacccaaattaggtattgaaccaggccggtctttggtggggcacactgctgtaaccctttatgaagtcggtaccatcaagcaagttccaggctatccgtcttatgtttccattgacggaggaatgagtgaccatatccggacagccttatacggtgctgagtatactatcttgcccaccactaaagccccatccaattcctcctggaagcccaagcaggtagtaggcaagctatgtgaaagtggcgatattatcgggaaaaacaagcccctcccccagtcattacaagtaggagacagactggctgtcttagctaccggggcctaccattattccatgtcttccaactataatctcatgcttaaaccagctgtggtctttgtcaaaggcaaggaccacaagctggtaaccaagagacaggacattgaccaagtcttgcaaaatgaagtttttgactaa

SEQ ID NO: 4938 - protein, 214 aa, Alloiococcus otitidis
MLETAQLVLDWAHDQEIPVQFLNMGGGFSIQYQEEDVAFDVQPGIAKLAGAIMDYCQEKDYQLPKLGIEPGRSLVGHTAVTLYEVGTIKQVPGYPSYVSIDGGMSDHIRTALYGAEYTILPTTKAPSNSSWKPKQVVGKLCESGDIIGKNKPLPQSLQVGDRLAVLATGAYHYSMSSNYNLMLKPAVVFVKGKDHKLVTKRQDIDQVLQNEVFD

SEQ ID NO: 4939 - DNA, 699 bp, Alloiococcus otitidis; identical to SEQ ID NO: 4937
  CDS (52)..(696)

SEQ ID NO: 4940 - protein, 215 aa, Alloiococcus otitidis
MMLETAQLVLDWAHDQEIPVQFLNMGGGFSIQYQEEDVAFDVQPGIAKLAGAIMDYCQEKDYQLPKLGIEPGRSLVGHTAVTLYEVGTIKQVPGYPSYVSIDGGMSDHIRTALYGAEYTILPTTKAPSNSSWKPKQVVGKLCESGDIIGKNKPLPQSLQVGDRLAVLATGAYHYSMSSNYNLMLKPAVVFVKGKDHKLVTKRQDIDQVLQNEVFD

SEQ ID NO: 4941 - DNA, 669 bp, Alloiococcus otitidis
  CDS (4)..(666)
ctaatgtcgctttattataacgatgaccaaaaattgtctatgggccagcttagcttagatagtcttgcagaccactaccaaacccccttaattgtttacgaccaggaggaaatcgaagccactattcacaagtaccaggagggtttccgccagggtttagacttaagtgaccaggctaaggcagatgacttttacagtatttcctatgctagtaaggcttttagtaatgtctacttattgaggttgatggctgattggggcttagacttagatgtggtctcttatggggaattatacctagcccttaaagcgggcttcccggcagaccgaattcactttcatggcaataataagagcctggaggaaatcaaatttgccttgcaagccggcattggtcactttgtagctgattcttttgaagaaattgaccggatcaatgacctagcccaggatgaagtggatgtgatggtccggcttaatccaggtatagctgttcagacccatgcctacatccagacaggtcaggaagatagcaagtttggtttttcgcttcgagagggcttggccaagcaagccattgataaggttatagcttgtcctaagttgaattttatcggtctccatttccacttggggttcccaggtccaagatccaagtgtgatgcttga

SEQ ID NO: 4942 - protein, 221 aa, Alloiococcus otitidis
MSLYYNDDQKLSMGQLSLDSLADHYQTPLIVYDQEEIEATIHKYQEGFRQGLDLSDQAKADDFYSISYASKAFSNVYLLRLMADWGLDLDVVSYGELYLALKAGFPADRIHFHGNNKSLEEIKFALQAGIGHFVADSFEEIDRINDLAQDEVDVMVRLNPGIAVQTHAYIQTGQEDSKFGFSLREGLAKQAIDKVIACPKLNFIGLHFHLGFPGPRSKCDA

SEQ ID NO: 4943 - DNA, 1089 bp, Alloiococcus otitidis
  CDS (22)..(1086)
ctagtaaggaggagggataaaatgccaggaagatggactgtcgacagccaggtttttcaagaaaatgccgagaaattagtccaaaaggcggactgctttgctgtggttaagaataatgcctataatttcggtttggattttgctgtagaccagtttttacaaatcggcatccagcattttgtcacaacctctttacatgaggctatagccgtccggaaaagggcgccccaagcgacgattttactcactaacccgaccagagaatttgacttagcccgaaaataccatattcaattgaccctaacctctttagattatttttatactttcaaagaccagcttgaagaccttcccctccagttagagtatgagagccacttgcaccggtctggcttaaaaaaccgggaggaaattgaccaagtcctagctcaccgaaacaagctagacatccagggtatttggacccattttggctatgccgatgacctggatggaccaggagatgaatacagtaaggaaagagaagaatggcttgaccttttagaagacctcctcgatgatggttaccagtttcactacatccatgcccaaaattcggccagtttcttcagggaaggaggactcttaccccaccatacccatagccgactggggattgccttgtatggggccaaaccttatgatgacttggccaatgaccggattgatcaatcactgacagtgtcagcttctgtggtccaggttagacagctaaaccagggccaatatgcaggctattccttcaaataccaggcatcccatcaaccgacccaactggccatcgtggatattggctatggggacggcctattgcaagctcgggccgactacccctgccagatcaggggcaaagattaccccatcgttggtttaatgatgagccacctcttggttgaagtagatgaccaggttcaaattggggaccgggtctacctttatagccccgatccgaaccttcggatagactacttcacccacaaaggtgtaggggccaattcccagcagttgtcagccttgaatttaaacagcttgataaaggagtatgactaa

SEQ ID NO: 4944 - protein, 355 aa, Alloiococcus otitidis
MPGRWTVDSQVFQENAEKLVQKADCFAVVKNNAYNFGLDFAVDQFLQIGIQHFVTTSLHEAIAVRKRAPQATILLTNPTREFDLARKYHIQLTLTSLDYFYTFKDQLEDLPLQLEYESHLHRSGLKNREEIDQVLAHRNKLDIQGIWTHFGYADDLDGPGDEYSKEREEWLDLLEDLLDDGYQFHYIHAQNSASFFREGGLLPHHTHSRLGIALYGAKPYDDLANDRIDQSLTVSASVVQVRQLNQGQYAGYSFKYQASHQPTQLAIVDIGYGDGLLQARADYPCQIRGKDYPIVGLMMSHLLVEVDDQVQIGDRVYLYSPDPNLRIDYFTHKGVGANSQQLSALNLNSLIKEYD

SEQ ID NO: 4945 - DNA, 1170 bp, Alloiococcus otitidis
  CDS (4)..(1167)
aatatggaccagggtcaatttgtggtagaaacacgccggaagctccaccagttagctgaagagagcctggaagaacaccaaactacccaagctattatttcctatttagaggagtggggcattcagtatgtcagacctctggatacaggggtcttggcctatatgaaaggagatagtgatagcgacagctttattgcctttcggtcagatatcgacgctctgcctattcaggaaaagcaagaccatgactttcaaagtaaaacaccaggtgtcatgcacgcttgtggtcatgatggccacatgacagctcttctcttatttgccaagcggttaagcgaccgccaccaggcaggagacttgaaggccaatgttatattcatcttccaacctgcagaagaaagctatggtgggggcaacttactgcttgaagcaggtgcctttgatgattttaatgtagaaaaagtttacggagtccacctcttgcctagcctagaagaaggccgggttatttacaaggatggccccattaccgcttccgctacagaataccggatctacttaaagggacaatctgcccatgtagcccacaaggaagaaggacattcggctattgaagccttgtctatcctcttaagccagatcccccttatcaatcactaccacttgaacggactaaaccataatattatccatattggccaagtgagagcaggtgaggccatcaacacggtcgcccaagatggctacttagagggcaccatccggacttatgaagccagtgacttgcaagtcattaaagaatccttaagtaaactggttgagtcagtccaaagcatgaccggggtggaggctgatttgacctacaaccaaggttatccacccactgacaaccacccaagtttgaaagcagaggtacagcaggccattgaccaggtaggcttaatcggggtggaggcagaccgacccttcctatttggtgaagactttagtttttacaaaagactagcgccatcttattttgttttttttggagtccaaaacctggacaaaaactttactgcgggtcttcatacacctgaattcaattttgacgaaatgaacctaatcaaaatagcggactattatgaaaagctactggacttggatatagctagtaaggaggagggataa

SEQ ID NO: 4946 - protein, 388 aa, Alloiococcus otitidis
MDQGQFVVETRRKLHQLAEESLEEHQTTQAIISYLEEWGIQYVRPLDTGVLAYMKGDSDSDSFIAFRSDIDALPIQEKQDHDFQSKTPGVMHACGHDGHMTALLLFAKRLSDRHQAGDLKANVIFIFQPAEESYGGGNLLLEAGAFDDFNVEKVYGVHLLPSLEEGRVIYKDGPITASATEYRIYLKGQSAHVAHKEEGHSAIEALSILLSQIPLINHYHLNGLNHNIIHIGQVRAGEAINTVAQDGYLEGTIRTYEASDLQVIKESLSKLVESVQSMTGVEADLTYNQGYPPTDNHPSLKAEVQQAIDQVGLIGVEADRPFLFGEDFSFYKRLAPSYFVFFGVQNLDKNFTAGLHTPEFNFDEMNLIKIADYYEKLLDLDIASKEEG

SEQ ID NO: 4947 - DNA, 744 bp, Alloiococcus otitidis
  CDS (10)..(741)
gaggcttttatgactgacaatatccaagaaaagaatgcccaagaaattatcgagtatatcagccaggctaagaagtcaaccccggtaaaagtttatgttaatggagacttttcaaagacaactttcccagattcttttaaagtttttgggacagaccaatctcttgttattttcactgagttaaaagattggcaggcctttatcgctgaccaccgggacttagtggaccaatctgaagtggagctggaccgacgcaattcagccattccactcaaggacctgacccaggtcaatgcccggattgaacccggttcctttattcgggaagaggctgaaatccacgatggagctgtcgttatgatgggagccgttattaatatcggtgccgtcgtcggcccagggaccatgattgacatgggagcctgcctgggtggccgggcgattacgggtaaaaatgctcatattggagcgggtgctgttctagcaggtgtcattgaacccccttctgctgacccagttgtggtcgaagatgatgcctttatcggggctaatgcggttgttttagaaggagtccgtattggccaaggagcgattgtggcagctgggtcagtcgtgaccaaagatgtgcctgcccacaaggtcgtagctggaacaccggctaaggttataaaatctgtccaagatgtggacgacaataaaaaagaaattgcccaagccttaagacaattagatgaccagcaatga

SEQ ID NO: 4948 - protein, 244 aa, Alloiococcus otitidis
MTDNIQEKNAQEIIEYISQAKKSTPVKVYVNGDFSKTTFPDSFKVFGTDQSLVIFTELKDWQAFIADHRDLVDQSEVELDRRNSAIPLKDLTQVNARIEPGSFIREEAEIHDGAVVMMGAVINIGAVVGPGTMIDMGACLGGRAITGKNAHIGAGAVLAGVIEPPSADPVVVEDDAFIGANAVVLEGVRIGQGAIVAAGSVVTKDVPAHKVVAGTPAKVIKSVQDVDDNKKEIAQALRQLDDQQ

SEQ ID NO: 4949 - DNA, 390 bp, Alloiococcus otitidis
  CDS (154)..(387)
tttggtgttcttccaggctctcttcagctaactggtggagcttccggcgtgtttctaccacaaattgaccctggtccatattctaacctgtctcccttcatctttcattgctggtcatctaattgtcttaaggcttgggcaatttcttttttattgtcgtccacatcttggacagattttataaccttagccggtgttccagctacgaccttgtgggcaggcacatctttggtcacgactgacccagctgccacaatcgctccttggccaatacggactccttctaaaacaaccgcattagccccgataaaggcatcatcttcgaccacaactgggtcagcagaagggggttcaatgacacctgctagaacagcacccgctccaatatga

SEQ ID NO: 4950 - protein, 78 aa, Alloiococcus otitidis
MSSTSWTDFITLAGVPATTLWAGTSLVTTDPAATIAPWPIRTPSKTTALAPIKASSSTTTGSAEGGSMTPARTAPAPI

SEQ ID NO: 4951 - DNA, 366 bp, Alloiococcus otitidis
  CDS (43)..(363)
gcatttttacccgtaatcgcccggccacccaggcaggctcccatgtcaatcatggtccctgggccgacgacggcaccgatattaataacggctcccatcataacgacagctccatcgtggatttcagcctcttcccgaataaaggaaccgggttcaatccgggcattgacctgggtcaggtccttgagtggaatggctgaattgcgtcggtccagctccacttcagattggtccactaagtcccggtggtcagcgataaaggcctgccaatcttttaactcagtgaaaataacaagagattggtctgtcccaaaaactttaaaagaatctgggaaagttgtctttgaaaagtctccattaacataa

SEQ ID NO: 4952 - protein, 107 aa, Alloiococcus otitidis
MSIMVPGPTTAPILITAPIITTAPSWISASSRIKEPGSIRALTWVRSLSGMAELRRSSSTSDWSTKSRWSAIKACQSFNSVKITRDWSVPKTLKESGKVVFEKSPLT

SEQ ID NO: 4953 - DNA, 726 bp, Alloiococcus otitidis
  CDS (13)..(723)
aggagtgcaatcatgaatattatcttaagtggatacgggaccatgaatcagttagtggctcaagtcgctcaagaccaaggtcatactattgtcggggtagtggccccaaaccagcaagaagactatcctagtctggattcctttaaccaggcttcagcagatttgatcattgatttttctcaccctgaccaccttctccccttgctagaagaggacctccaagtgcctatagtagtagccaccacaggggaaaaagacaaaattcaagcagccttacaccagcaagcagaccatgttccggtctttttcgaagccaatatgagttatgggatccatgccctaagccaaatcctagaaaaggcgcttagtctcctccaggattacgatgttgaacttttggaagcccaccacaatcaaaaagtggatgccccaagtggaacattggtaaaattgttagacctagtcagtgaggctagacctgactcttaccctaactatgatcggcatgaagcttcaggcaaacggaaccccgatgagattgggattcataccttaagagggggcagcattgtgggggaccatgaagttctatttgctggaccagatgaaagtatcaagatttcccaccaggcagggtccaaggctatttttgccagaggggctctccgggctggggcgaaattgattgacaaagaacccggttactacagctttgacaacttatag

SEQ ID NO: 4954 - protein, 237 aa, Alloiococcus otitidis
MNIILSGYGTMNQLVAQVAQDQGHTIVGVVAPNQQEDYPSLDSFNQASADLIIDFSHPDHLLPLLEEDLQVPIVVATTGEKDKIQAALHQQADHVPVFFEANMSYGIHALSQILEKALSLLQDYDVELLEAHHNQKVDAPSGTLVKLLDLVSEARPDSYPNYDRHEASGKRNPDEIGIHTLRGGSIVGDHEVLFAGPDESIKISHQAGSKAIFARGALRAGAKLIDKEPGYYSFDNL

SEQ ID NO: 4955 - DNA, 879 bp, Alloiococcus otitidis
  CDS (73)..(876)
gaggacatcatgagtcacttattcacaggtacaggtgtagcccttttcacccccttcaatgactggggacaggtggactatactagcttaagtcaactggtcaattttttaatccagaaccaaagtcaggcccttattgtcaatggtacaactggggaaagctccaccttgaccaaggatgaaaaggaaaaaatcttaaaaacagtggtggacttggctgattccaaggttaaagttattgccaatgtcggtaccaacaatacggcccagtccattgaaaatgccaaggcagcccaggcactaggagcagatggtctcttgctaattaccccttactataataaaaccaaccagcgaggcttaatcaaacactatgaaagtattctaggagaagtcgatttgccagccatcctctatgatgtgccaggccggacagggatgcgaattgaattagccaccctagaagagttaagccaccacccccaaatcattggtttgaaagatgccacaggggacttggacttctttaagcaagccaaggaaagggttcaagacacctttagtttctacagtggcaacgatggcaatatccagtcctactaccaactgggtggccatggggtaatatcggtcttggccaacgttctccctagcgacttccaacaagtctatgaccaaccagaagggaactaccaagccttgtttgacttggtggaggccttgaatgttgatgtcaatccaattccgattaaggccttagcccaccacctcaacttggcccaaaacaagcttcgcctaccccttgttgaattgggaccgaaagaagagattgaattgattaaagcttaccaaagataccatgaaggagtgcaatcatga

SEQ ID NO: 4956 - protein, 268 aa, Alloiococcus otitidis
MDYTSLSQLVNFLIQNQSQALIVNGTTGESSTLTKDEKEKILKTVVDLADSKVKVIANVGTNNTAQSIENAKAAQALGADGLLLITPYYNKTNQRGLIKHYESILGEVDLPAILYDVPGRTGMRIELATLEELSHHPQIIGLKDATGDLDFFKQAKERVQDTFSFYSGNDGNIQSYYQLGGHGVISVLANVLPSDFQQVYDQPEGNYQALFDLVEALNVDVNPIPIKALAHHLNLAQNKLRLPLVELGPKEEIELIKAYQRYHEGVQS

SEQ ID NO: 4957 - DNA, 879 bp, Alloiococcus otitidis; identical to SEQ ID NO: 4955
  CDS (10)..(876)

SEQ ID NO: 4958 - protein, 289 aa, Alloiococcus otitidis
MSHLFTGTGVALFTPFNDWGQVDYTSLSQLVNFLIQNQSQALIVNGTTGESSTLTKDEKEKILKTVVDLADSKVKVIANVGTNNTAQSIENAKAAQALGADGLLLITPYYNKTNQRGLIKHYESILGEVDLPAILYDVPGRTGMRIELATLEELSHHPQIIGLKDATGDLDFFKQAKERVQDTFSFYSGNDGNIQSYYQLGGHGVISVLANVLPSDFQQVYDQPEGNYQALFDLVEALNVDVNPIPIKALAHHLNLAQNKLRLPLVELGPKEEIELIKAYQRYHEGVQS

SEQ ID NO: 4959 - DNA, 981 bp, Alloiococcus otitidis
  CDS (1)..(978)
atggttaaattagcagttgtaggtgctacaggtgttgttggccgtaaaattttagacgttttggaccgaagaggggtggaaattgatgacctcaccctcttttcttccagtcggtcagctggtagggaacttgtttttaaagaccaaccattgacagttcgcgagctgactgatcaagcggcccaagaaggctttgattatgttttaatgagtgcaggcagctcagtcagtgaccaatttgctcctatttttgaagccagtggagccattgtgattgataattccagtcgctttcgaaacgaagatgacatggacttagtcgtcccaggggtcaaccaggctaaattgaaccgccatatcatcgccaaccctaactgctccactatacaatcagttgttcccctcaaaatattagatgaggcctaccaagtcactcgggtagcctatacaacctatcaagctgtttccgggtcaggtaaggcaggtttggaggacttggctaatggaccagagggtaccccacctaaggcttatccttatcccatatacaacaatgtcctcccccatattgaccagtttttaccagatggctacaccaaagaagaacaaaagatgattgacgaaacccagaaaatcctaggcaaagacattccgaccaccgccacctgtgcccgggttccggtatcggatggacacagtgttcatatcaatgttagtttagaccaaccgactgacgtggcttccattcaagccctattcgaccaggaccccagagtggtcttaagagaccaaccagaccaagagatttacccccaagccttagaagccgctggtagtgatgatatttatgttggccggattcggtctgacgccaccctgtccaacaccttccatatctggtgtacagcagacaacctgctcaaaggagcagctttaaacaccgtccaaatcttagaagaagtaatgaaaagcagaggctaa

SEQ ID NO: 4960 - protein, 326 aa, Alloiococcus otitidis
MVKLAVVGATGVVGRKILDVLDRRGVEIDDLTLFSSSRSAGRELVFKDQPLTVRELTDQAAQEGFDYVLMSAGSSVSDQFAPIFEASGAIVIDNSSRFRNEDDMDLVVPGVNQAKLNRHIIANPNCSTIQSVVPLKILDEAYQVTRVAYTTYQAVSGSGKAGLEDLANGPEGTPPKAYPYPIYNNVLPHIDQFLPDGYTKEEQKMIDETQKILGKDIPTTATCARVPVSDGHSVHINVSLDQPTDVASIQALFDQDPRVVLRDQPDQEIYPQALEAAGSDDIYVGRIRSDATLSNTFHIWCTADNLLKGAALNTVQILEEVMKSRG

SEQ ID NO: 4961 - DNA, 1287 bp, Alloiococcus otitidis
  CDS (64)..(1284)
tttttgggacaagttcggccactcgaacttgtcttttttcattgtttgattaaaggaggacttatgtctgtttcagtcttaaaatacggtgggtcgtccgttagtaattttgaccaaattaaagatattgcccgctacatccaaaagcgggtagaccaaggcgaccaatgtatcgtagtcgtcagtgccatgggcaagaccacggaccagctattagcttcggtggctagtttgacaccagatcctaaaaatgaagacttggctttgctcctatcgaccggagagcaacaatcggtttcctatctttctttggttttaaatgacttaggtgtcaagtctaaatccttgaccggctaccaggcaggcattaagacctcaggccatgttttaaaaagtaagatcaagactatggacccgggtctctttcaagacaagttgaaggactatgattgcctggttgtggccggctttcagggggtcaaccaagactcagacatgaccaccctcggtcggggcggtagtgatacaacggcagtggccattgcagcttcactaaaggccccttgcgaaatatatactgacgttccaggtgtgtttgcgactgacccccgggtttttcctcaagctcccaagctagacttgatcacctatgaagaaatgatggaattgtccgccttgggtgcaggcgttttggagagccggagcgtggagatagccaaaaattatggtgtcaagatatacctggggaaaacattatcagaccaaggaggaacatgggtagtggctgaagaggaattatttgaaaagaaagcagtaacgggggtagccttggatatggacatgtcccatattaccatgacctatcccgatcaaaacatcaatcttttaagacggttgtttgaatttttacaaaaaaacgaaattaatgtggacatgatctctcagattaataacgaccaagccttgcagttttcctttacctaccagtcggatgaatccaataccctgtcacactggttacaaggcctgaaagaagactatcctgccttatcttacgtgattagcgaccattatgccaaaatttccttggttgggtccgggatgcgtgagatgtccggagtcgcttccaaagcatttatggccttgatcaaccaggctattcctttttaccagaccaccacttcagaaattagtatttcttatgtcatcgatcgtaagaaggcagaccaagcagttgctagcttgtgccaggcttttggaataacaaaggaggatataaatggttaa

SEQ ID NO: 4962 - protein, 407 aa, Alloiococcus otitidis
MSVSVLKYGGSSVSNFDQIKDIARYIQKRVDQGDQCIVVVSAMGKTTDQLLASVASLTPDPKNEDLALLLSTGEQQSVSYLSLVLNDLGVKSKSLTGYQAGIKTSGHVLKSKIKTMDPGLFQDKLKDYDCLVVAGFQGVNQDSDMTTLGRGGSDTTAVAIAASLKAPCEIYTDVPGVFATDPRVFPQAPKLDLITYEEMMELSALGAGVLESRSVEIAKNYGVKIYLGKTLSDQGGTWVVAEEELFEKKAVTGVALDMDMSHITMTYPDQNINLLRRLFEFLQKNEINVDMISQINNDQALQFSFTYQSDESNTLSHWLQGLKEDYPALSYVISDHYAKISLVGSGMREMSGVASKAFMALINQAIPFYQTTTSEISISYVIDRKKADQAVASLCQAFGITKEDING

SEQ ID NO: 4963 - DNA, 1287 bp, Alloiococcus otitidis; identical to SEQ ID NO: 4961
  CDS (4)..(1284)

SEQ ID NO: 4964 - protein, 427 aa, Alloiococcus otitidis
MGQVRPLELVFFHCLIKGGLMSVSVLKYGGSSVSNFDQIKDIARYIQKRVDQGDQCIVVVSAMGKTTDQLLASVASLTPDPKNEDLALLLSTGEQQSVSYLSLVLNDLGVKSKSLTGYQAGIKTSGHVLKSKIKTMDPGLFQDKLKDYDCLVVAGFQGVNQDSDMTTLGRGGSDTTAVAIAASLKAPCEIYTDVPGVFATDPRVFPQAPKLDLITYEEMMELSALGAGVLESRSVEIAKNYGVKIYLGKTLSDQGGTWVVAEEELFEKKAVTGVALDMDMSHITMTYPDQNINLLRRLFEFLQKNEINVDMISQINNDQALQFSFTYQSDESNTLSHWLQGLKEDYPALSYVISDHYAKISLVGSGMREMSGVASKAFMALINQAIPFYQTTTSEISISYVIDRKKADQAVASLCQAFGITKEDING

SEQ ID NO: 4965 - DNA, 303 bp, Alloiococcus otitidis
  CDS (7)..(300)
acagaaatgaggatgcttatgtcgagtaacaatgaccatgactacttaaacttgatcgaccaagacggcaatgaggaattgcacgaaatcttatttacttttgaatcagaagattttgaccgatcttatgtcttactttacccagccaaggaagctgacaatgaagagattgaactcaaagcctttgcttaccgggaagaagatggaggattagaaggccaactgcttccgattgagtctgaccaagaatgggacatggttgaagaagtcttgaatacctttttagaagaggaagaagactag

SEQ ID NO: 4966 - protein, 98 aa, Alloiococcus otitidis
MRMLMSSNNDHDYLNLIDQDGNEELHEILFTFESEDFDRSYVLLYPAKEADNEEIELKAFAYREEDGGLEGQLLPIESDQEWDMVEEVLNTFLEEEED

SEQ ID NO: 4967 - DNA, 477 bp, Alloiococcus otitidis
  CDS (67)..(474)
acgagacgaaatcttagaagaactcattaccttttacatggaccatatcgacgaaaaatgagggtaatgggtcttgatgtgggatccaagacagttggcatcgcagtgagcgaccctttgggttggactgcccagtccttggaaaccatcaaaatcaatgaaaatagaaaagaatttggcctggaccaagtctgtgccttggttgaggcatacgaggtctctaaagttgttgtaggcctgcctaaaaatatggatgggtcaattggagaccgggcccaagcaagcttgaattatggccgcatgctcgaggaagcctgcggggtagcagtgacttaccaagatgaacgcttgaccaccatgcaggttaaccggatgatgatcgaagaaggcgacctttccaggaagaagcgtaagcaactggttgacaagctggctgctcaggctattttacagacttatatggatagacagaaatga

SEQ ID NO: 4968 - protein, 136 aa, Alloiococcus otitidis
MGLDVGSKTVGIAVSDPLGWTAQSLETIKINENRKEFGLDQVCALVEAYEVSKVVVGLPKNMDGSIGDRAQASLNYGRMLEEACGVAVTYQDERLTTMQVNRMMIEEGDLSRKKRKQLVDKLAAQAILQTYMDRQK

SEQ ID NO: 4969 - DNA, 477 bp, Alloiococcus otitidis; identical to SEQ ID NO: 4967
  CDS (58)..(474)

SEQ ID NO: 4970 - protein, 139 aa, Alloiococcus otitidis
MRVMGLDVGSKTVGIAVSDPLGWTAQSLETIKINENRKEFGLDQVCALVEAYEVSKVVVGLPKNMDGSIGDRAQASLNYGRMLEEACGVAVTYQDERLTTMQVNRMMIEEGDLSRKKRKQLVDKLAAQAILQTYMDRQK

SEQ ID NO: 4971 - DNA, 291 bp, Alloiococcus otitidis
  CDS (19)..(288)
agaataggaggaagaagtatgtctaacactgatcatggcgatcgtaccatgcgctttaactttgagattgatggcgaacaagaagtgagtcaaacacttaaaaccgtttatcaatctttagaagaaaagggctataatccaaccaatcaaatcgtaggttatttattatcaggggacccagcatacattcctcgccacaatgactcacgtaatttgattaaacgtcatgaacgagacgaaatcttagaagaactcattaccttttacatggaccatatcgacgaaaaatga

SEQ ID NO: 4972 - protein, 90 aa, Alloiococcus otitidis
MSNTDHGDRTMRFNFEIDGEQEVSQTLKTVYQSLEEKGYNPTNQIVGYLLSGDPAYIPRHNDSRNLIKRHERDEILEELITFYMDHIDEK

SEQ ID NO: 4973 - DNA, 969 bp, Alloiococcus otitidis
  CDS (28)..(966)
cacccaacagaaaggaagcatcctcgtatggctattataacagaagaaatgcgttatcgcgaaaaagttgtaaaatatgcgatcaaacagggcaacaatgcccaagcagcccgccgttaccacaccaaccggatgcaggtcaaacggtggcgagaccgttatgatggcacggtcgaaagtctgcgaaaccagtccactcggccccatagccatcctcgtcagcaccaaaaagaggagctgaccttgattaaaaaagtttatcaacgctatggccatgaagggcttgcccaggtttacgttgaatgtcagaaaaggggctatcgtcggtcctatggcagtatgagtaagcagattagagaccgcaaatgggggatgtcggaagaagctgcccccaaacgctatcccaaatcaaaatggcaagcggacccggtgtcttatcccggtgaaaaagtccaaattgatatcaaatacgtccctcatgaatgcattcagtttgagagttatgaccgtcgttactaccaaatcacggccattgatgagttctctcgcaaacgacactgtaccatcgtcgacgaaaaaagtgtcacgcatacggcccaatttctgcttgatttacaagaccagctgggctttcaaattcagatggttcaaactgataaaggggctgagtttgttaacgatcccgataaaacaacgaaaaagaccttgtttgaacaacgcttaaaagagcttggcattcagtaccgaaacacccggccctactccccttggcaaaacggaaaggtcgaaagaagccaccgggaagatcaagttcgtttttatagtaagcgcgtttttacatcggaagcggatatgaagaagcaacaccagcggtatatgagtcgccataataacattgtccgaaaagtcctcaattttcgaagtcctaatcaagtggtcgatcagtatagggcagaagtcgcttcttag

SEQ ID NO: 4974 - protein, 313 aa, Alloiococcus otitidis
MAIITEEMRYREKVVKYAIKQGNNAQAARRYHTNRMQVKRWRDRYDGTVESLRNQSTRPHSHPRQHQKEELTLIKKVYQRYGHEGLAQVYVECQKRGYRRSYGSMSKQIRDRKWGMSEEAAPKRYPKSKWQADPVSYPGEKVQIDIKYVPHECIQFESYDRRYYQITAIDEFSRKRHCTIVDEKSVTHTAQFLLDLQDQLGFQIQMVQTDKGAEFVNDPDKTTKKTLFEQRLKELGIQYRNTRPYSPWQNGKVERSHREDQVRFYSKRVFTSEADMKKQHQRYMSRHNNIVRKVLNFRSPNQVVDQYRAEVAS

SEQ ID NO: 4975 - DNA, 381 bp, Alloiococcus otitidis
  CDS (100)..(378)
gtaagcagattagagaccgcaaatgggggatgtcggaagaagctgcccccaaacgctatcccaaatcaaaatggcaagcggacccggtgtcttatcccggtgaaaaagtccaaattgatatcaaatacgtccctcatgaatgcattcagtttgagagttatgaccgtcgttactaccaaatcacggccattgatgagttctctcgcaaacgacactgtaccatcgtcgacgaaaaaagtgtcacgcatacggcccaatttctgcttgatttacaagaccagctgggctttcaaattcagatggttcaaactgataaaggggctgagtttgttaacgatcccgataaaacaacgaaaaagaccttgtttgaacaacgcttaa

SEQ ID NO: 4976 - protein, 93 aa, Alloiococcus otitidis
MKKSKLISNTSLMNAFSLRVMTVVTTKSRPLMSSLANDTVPSSTKKVSRIRPNFCLIYKTSWAFKFRWFKLIKGLSLLTIPIKQRKRPCLNNA

SEQ ID NO: 4977 - DNA, 2688 bp, Alloiococcus otitidis
  CDS (37)..(2685)
tctagcttcttcggattgatcataaaagtaaaaaggatggttaaaatgaaatacttaactgggtcagagctcagacaattgtttttagacttttttaaagaaaagggccatgaagtcaagccaagtgcctccctcatccccgtaaatgaccctagcttgctttggattaactctggtgtcgcaaccttaaaaaaatattttgacggaagtttaacccccgacaatcctcgcatcgtcaatgcccaaaagagtatccggaccaatgatattgaaaacgtgggacgaactgcccgccaccacaccctctttgaaatgttgggcaacttttcaattggggactactttaaagaagaagccattgtttgggcctgggaatttttaacagggaatagatggatggccattgacccagacttgctctatgtcactatctatccggatgacactgaagctcaccggatttggcatgacgttgtgggcttgtccgaagaccacattatcggagaagaaggtaacttctgggacataggtcttggcccatctggacccaatactgagatcttttatgaccgggggccggaatatttagaagcagatttgcctgaaaaagaaaactatccaggtggggaaaactcccgttggttggaaatttggaacctcgttttctcccaatttaaccacaaggaagatgacagttatgaacccctccccaacaagaacattgatacaggtatgggcttagaacggatgttgtccatcgtccaagatgctcctaccaactttgaaactgacctctttatgcccattatccacaaggttgaagagatatccggacaaagctacgacgatgaagcgaataagatgagctttaaggtcattgctgaccacatccgggctatttcttttgccatcggggatggggccttgccatctaatgaaggtcggggttatgtcctccgccgactcttgagaagggcagtcatgcatggtcgtcgtttgggcatctaccaccccttcctccaccatcttgttcccattgttggtcagattacagctagtcactacaaggaagtcgttgacaaggcagacttgattcaagatcttgtccttaaggaagaagaacggttttttgaaacccttacagaggggtcgagccacttgagtacaatcttggagaaattgcaggaagagggcgaaaacttactttctggtcaggatgccttcttactttacgatacctatggctttccagttgaattaacagaagagatcgctaaagaaaaaggagtccaagtggattttgaaggctaccaggcagaaatggaaaaacaaaaaaaccgggcccgggctgccagaagtgatgaccagtccatgcaggtgcaatcagacctcttgaccaagttagatgtctccgatgactttttaggttatgaccaacttgaaagtcaagggcaacttgtcaccattttggcagacgaccaagtccaggaagaagtcggtcaagggcaagcccgtttgatttttgacgcaacccctttctatgccgaaaagggaggacaggtcggtgaccagggcaccgtccgtaacttaaaccaagaagtagttgcccatgtaactgatgtccagtcaggtcctggcgaccaacacctccacctagtcgatgtggtccaaccccttaaagttggggagacttatctcttgacagtagacgccaaaagaaggtcccttgtcgagaaaaaccacacagctacccacctcctccaccaagccttgaaagacgtcttgggttctcatgtcaaccaagcggggtctttagtgaatgaagacttacttcggttcgactttacccacttttcgccacttgaacccggtgaattgaagcaagttgagcggattgtcaaccagaaaatttgggataatattggcttggaaaccaaggtgactagtcttgataaggctaaagaaatgggagccatggcacttttcggtgaaaaatatagccaggaagtccgagtggtcttggtcgatgactactccaaggaactatgtggtggaacccacgtgaagactactggggatattggcctctttaaaattaccagtgaatctgggattggagcagggacccggcggattgttgccgtcactagccgggcagcctatgaatggttggacgaaaaaacccagctcttagaccaggcccaagaccagttaaaagctcagaccagccaggatgtattgcaacgcattaccagcctccaaaacgacttaaaggccctagacaaggaaaatgaatccttgaacgctcgtttagccaaccaacaagctgacaatatattccaagatgtccaagaagtggcaggttaccaagtgatcgctcaagaagctaaggttaaagacatgggacaactccggcaactagctgataagtggaaagagtcggactattctgatatccttgttctaggcttgcgtaagggtgggaaggtcaatcttattgtggcttgtcaggagtctgctatcgcaaacggcatcaaggctggggacttaattaagcacctggcccaatttgtcggtggtggcggtggaggccgtcctgacttagcccaggcagggggatctcagccagacggattagaaaaagccttacaagaaacctttacctggcttgaagatagagggaactaa

SEQ ID NO: 4978 - protein, 883 aa, Alloiococcus otitidis
MVKMKYLTGSELRQLFLDFFKEKGHEVKPSASLIPVNDPSLLWINSGVATLKKYFDGSLTPDNPRIVNAQKSIRTNDIENVGRTARHHTLFEMLGNFSIGDYFKEEAIVWAWEFLTGNRWMAIDPDLLYVTIYPDDTEAHRIWHDVVGLSEDHIIGEEGNFWDIGLGPSGPNTEIFYDRGPEYLEADLPEKENYPGGENSRWLEIWNLVFSQFNHKEDDSYEPLPNKNIDTGMGLERMLSIVQDAPTNFETDLFMPIIHKVEEISGQSYDDEANKMSFKVIADHIRAISFAIGDGALPSNEGRGYVLRRLLRRAVMHGRRLGIYHPFLHHLVPIVGQITASHYKEVVDKADLIQDLVLKEEERFFETLTEGSSHLSTILEKLQEEGENLLSGQDAFLLYDTYGFPVELTEEIAKEKGVQVDFEGYQAEMEKQKNRARAARSDDQSMQVQSDLLTKLDVSDDFLGYDQLESQGQLVTILADDQVQEEVGQGQARLIFDATPFYAEKGGQVGDQGTVRNLNQEVVAHVTDVQSGPGDQHLHLVDVVQPLKVGETYLLTVDAKRRSLVEKNHTATHLLHQALKDVLGSHVNQAGSLVNEDLLRFDFTHFSPLEPGELKQVERIVNQKIWDNIGLETKVTSLDKAKEMGAMALFGEKYSQEVRVVLVDDYSKELCGGTHVKTTGDIGLFKITSESGIGAGTRRIVAVTSRAAYEWLDEKTQLLDQAQDQLKAQTSQDVLQRITSLQNDLKALDKENESLNARLANQQADNIFQDVQEVAGYQVIAQEAKVKDMGQLRQLADKWKESDYSDILVLGLRKGGKVNLIVACQESAIANGIKAGDLIKHLAQFVGGGGGGRPDLAQAGGSQPDGLEKALQETFTWLEDRGN

SEQ ID NO: 4979 - DNA, 2688 bp, Alloiococcus otitidis; identical to SEQ ID NO: 4977
  CDS (16)..(2685)

SEQ ID NO: 4980 - protein, 890 aa, Alloiococcus otitidis
MIIKVKRMVKMKYLTGSELRQLFLDFFKEKGHEVKPSASLIPVNDPSLLWINSGVATLKKYFDGSLTPDNPRIVNAQKSIRTNDIENVGRTARHHTLFEMLGNFSIGDYFKEEAIVWAWEFLTGNRWMAIDPDLLYVTIYPDDTEAHRIWHDVVGLSEDHIIGEEGNFWDIGLGPSGPNTEIFYDRGPEYLEADLPEKENYPGGENSRWLEIWNLVFSQFNHKEDDSYEPLPNKNIDTGMGLERMLSIVQDAPTNFETDLFMPIIHKVEEISGQSYDDEANKMSFKVIADHIRAISFAIGDGALPSNEGRGYVLRRLLRRAVMHGRRLGIYHPFLHHLVPIVGQITASHYKEVVDKADLIQDLVLKEEERFFETLTEGSSHLSTILEKLQEEGENLLSGQDAFLLYDTYGFPVELTEEIAKEKGVQVDFEGYQAEMEKQKNRARAARSDDQSMQVQSDLLTKLDVSDDFLGYDQLESQGQLVTILADDQVQEEVGQGQARLIFDATPFYAEKGGQVGDQGTVRNLNQEVVAHVTDVQSGPGDQHLHLVDVVQPLKVGETYLLTVDAKRRSLVEKNHTATHLLHQALKDVLGSHVNQAGSLVNEDLLRFDFTHFSPLEPGELKQVERIVNQKIWDNIGLETKVTSLDKAKEMGAMALFGEKYSQEVRVVLVDDYSKELCGGTHVKTTGDIGLFKITSESGIGAGTRRIVAVTSRAAYEWLDEKTQLLDQAQDQLKAQTSQDVLQRITSLQNDLKALDKENESLNARLANQQADNIFQDVQEVAGYQVIAQEAKVKDMGQLRQLADKWKESDYSDILVLGLRKGGKVNLIVACQESAIANGIKAGDLIKHLAQFVGGGGGGRPDLAQAGGSQPDGLEKALQETFTWLEDRGN

SEQ ID NO: 4981 - DNA, 444 bp, Alloiococcus otitidis
  CDS (37)..(441)
tccccaattgaaaagttgcccaacatttcaaagagggtgtggtggcgggcagttcgtcccacgttttcaatatcattggtccggatactcttttgggcattgacgatgcgaggattgtcgggggttaaacttccgtcaaaatatttttttaaggttgcgacaccagagttaatccaaagcaagctagggtcatttacggggatgagggaggcacttggcttgacttcatggcccttttctttaaaaaagtctaaaaacaattgtctgagctctgacccagttaagtatttcattttaaccatcctttttacttttatgatcaatccgaagaagctagattactgtcttcactattctatcggtctcctaactataagttatgaaaaaaaggcaataccactgcatgtaagggcgtcaatcgcggtaccaccttacttgcaataa

SEQ ID NO: 4982 - protein, 135 aa, Alloiococcus otitidis
MWWRAVRPTFSISLVRILFWALTMRGLSGVKLPSKYFFKVATPELIQSKLGSFTGMREALGLTSWPFSLKKSKNNCLSSDPVKYFILTILFTFMINPKKLDYCLHYSIGLLTISYEKKAIPLHVRASIAVPPYLQ

SEQ ID NO: 4983 - DNA, 444 bp, Alloiococcus otitidis; identical to SEQ ID NO: 4981
  CDS (16)..(441)

SEQ ID NO: 4984 - protein, 142 aa, Alloiococcus otitidis
MPNISKRVWWRAVRPTFSISLVRILFWALTMRGLSGVKLPSKYFFKVATPELIQSKLGSFTGMREALGLTSWPFSLKKSKNNCLSSDPVKYFILTILFTFMINPKKLDYCLHYSIGLLTISYEKKAIPLHVRASIAVPPYLQ

SEQ ID NO: 4985 - DNA, 1017 bp, Alloiococcus otitidis
  CDS (97)..(1014)
aataataacgtctgtcagcttgcttcatatttatcctccttatccaaacttaatcttattatactggagaataaattttttaaaaataatgaaaggatgagtaaattgatagaattagccaagcggtattctttttctatcgcagactacgtgtacatgctagtgggcacctttattgtagcagttgccttccagctttttttactgccaaataatatcgtatccggaggcgtcaccggtctttccattgtcttttcggacttgttgggttggtctccagtttttatccagtacttatttaatattcccttacttttagttgcctatattttcctcggtaaggaagccggtaaccggactattttagccagtttaatcctgcctctctttatttccttaattggcaactggcagccggccactactgatatcttcttagcaactgttatcgggggtatcgtcaatggaataggtctggggatagttttccgggccaaggcttcaacaggtggaacctctatcctagcccaaattctaaataaatacacaggcttgtccttaggggcaactactatgttgtctgatggtttggtaatcttgctttctctcacaaccttccaagtcaacactgttttgtatggttttatcaacctttacattaccacccggtctattgacatgacccaggtcgggatccggtcccacaaaaatgtacttattatttcgaaagaatctgaaagcattaagaaactcattatgaacaccatcaaccggggggtcaccaatattgggatccgaggtggcatggccaaccaaaaccgggacatgttgatgtgtgtcattcccgagcgtgagttcccttacctcaaggaaatgatcctccaatatgatgaggaagcctttgtggttgtgatgagtgcttctgaggttatgggaaggggcttctctcttgctaataaatttgagtcttatgggaactcccaatttgtcgaagaagtagttgacagtaaggaataa

SEQ ID NO: 4986 - protein, 306 aa, Alloiococcus otitidis
MSKLIELAKRYSFSIADYVYMLVGTFIVAVAFQLFLLPNNIVSGGVTGLSIVFSDLLGWSPVFIQYLFNIPLLLVAYIFLGKEAGNRTILASLILPLFISLIGNWQPATTDIFLATVIGGIVNGIGLGIVFRAKASTGGTSILAQILNKYTGLSLGATTMLSDGLVILLSLTTFQVNTVLYGFINLYITTRSIDMTQVGIRSHKNVLIISKESESIKKLIMNTINRGVTNIGIRGGMANQNRDMLMCVIPEREFPYLKEMILQYDEEAFVVVMSASEVMGRGFSLANKFESYGNSQFVEEVVDSKE

SEQ ID NO: 4987 - DNA, 345 bp, Alloiococcus otitidis
  CDS (49)..(342)
gtcagggggccaaatttttgttttgacttatcctggctgatactggcgatgacccggccgtcgatccccgccccaatactgttgaccacgtatgctttgtctttggcattttcaaccaggattaagtcgttaacaactggttcttggacttgtagcaggtggtcaaaagcctcttcgaacttggtggaaacctggtgggctcggataaaatcattgcctgccccagcaggcaagactccaactgggttagacagaccggcttcttttagggcttgtactaagtcccccaaagacccgtccccaccgacagaaattataatgtcacgattatgtaaagagtcttga

SEQ ID NO: 4988 - protein, 98 aa, Alloiococcus otitidis
MTRPSIPAPILLTTYALSLAFSTRIKSLTTGSWTCSRWSKASSNLVETWWARIKSLPAPAGKTPTGLDRPASFRACTKSPKDPSPPTEIIMSRLCKES

SEQ ID NO: 4989 - DNA, 936 bp, Alloiococcus otitidis
  CDS (22)..(933)
gtttggataaggaggataaatatgaagcaagctgacagacgttattatttcatcatcaatatctttgctaatcgtggctcagaagcaagtgataaattaagtcgactcttaaaacaaagtaagctagactataaactatttaaaacgtctaggcactacaatattaaagatattgtccaaaaaattcaagactctttacataatcgtgacattataatttctgtcggtggggacgggtctttgggggacttagtacaagccctaaaagaagccggtctgtctaacccagttggagtcttgcctgctggggcaggcaatgattttatccgagcccaccaggtttccaccaagttcgaagaggcttttgaccacctgctacaagtccaagaaccagttgttaacgacttaatcctggttgaaaatgccaaagacaaagcatacgtggtcaacagtattggggcggggatcgacggccgggtcatcgccagtatcagccaggataagtcaaaacaaaaatttggccccctgacctatctggcgcctgccgttgaggccttgttctaccagtctccctttgacgctaggattaaaatattaggcagagaaattgaggtaaaaaagactcccatcatcttatttatgaaccatgggtcattcggaggcggaatccaaatcaaccctcaggcagatccgacagatggctttatgaacatcatctttgctaaggacttatcattttgggacttgttaactttagtcgttaaaattttcacttcaaaagaccaactcagccaccctaaggtttaccaagtccgagctaagcaagtagaggttcaagttcggtccaatgaatactggcaggctgatggagagagcctgggttcaaaccagcaaacttataagctcagtagcctaaaacaaagctattggatctag

SEQ ID NO: 4990 - protein, 304 aa, Alloiococcus otitidis
MKQADRRYYFIINIFANRGSEASDKLSRLLKQSKLDYKLFKTSRHYNIKDIVQKIQDSLHNRDIIISVGGDGSLGDLVQALKEAGLSNPVGVLPAGAGNDFIRAHQVSTKFEEAFDHLLQVQEPVVNDLILVENAKDKAYVVNSIGAGIDGRVIASISQDKSKQKFGPLTYLAPAVEALFYQSPFDARIKILGREIEVKKTPIILFMNHGSFGGGIQINPQADPTDGFMNIIFAKDLSFWDLLTLVVKIFTSKDQLSHPKVYQVRAKQVEVQVRSNEYWQADGESLGSNQQTYKLSSLKQSYWI

SEQ ID NO: 4991 - DNA, 2433 bp, Alloiococcus otitidis
  CDS (19)..(2430)
ccgaaggaggaggaagggatgcaagaggaggaaaattatgttaccggacgagtgcttgcgattttcttcaccagtcctgataactattacaaggttttaaaaattaagataaaggatcaagatatgctttatgatgaaggcgatattgtcgtggtcggtcactttggccgagtccaggaaggagaagactataccttctatggccacctgaccagccaccccaagtatgggctccagtttgcagctaaccgctatgaagaccagaaaccttctagtgaggaggcccttattagctacttgtcaagctcgaaattcaaggggattggtcccaaaacagcccaaaacattgtggatgagcttggcatcaatgccttagaccttatcttggacgaccctagttatttggaccaggttagcaatttaaagcaagacaaaaaagacctgattgctaaaaacgtccatgctgaaagaggcgtccagaaaatcatcttgaaattgaatgaatatgggatttccaatgaattggcctaccggatctatgcgaagtatgaggaaaaaaccctagccaccatccaaaataacccctaccaattaatttacgacattaaaaatattggcttcaacaaggctgaccaaattgcatatgaaattggaattaagcccgattccaaggagcgtttgtatgccggggtggtccatagcttaacagaagacagccttaaccaagggcatacctaccttgaaggagagactatggtggaagcaaccatccggaccttagaaaagagtcaagactatatcattgacccaggcgacttggctgaccgaattggggaaatggtggaggctgaaatgatttttaaggatcaagaccactattatcttccgtctctcaataactctgaatggggaattgtctcggccattgaacgaatcaagtcccaaagtagccaggccttgtccaagggttacttaagcgactgcttagcagaggtcgaagcagacaatgacttgacatatgataaaggacaaagggaggccatcctccaggccatcatgtctcccctttttattttgaccggagggccagggacagggaagacaacggtcttaaaaggcttgatccaactatttgcccaggtgcatgacttatctcttgacccagctgactacccaaaccaagcctttcctattttaatggctgctccaactggacgggcagccaagcggatgggggagacaacaggtctccctgcttccaccatccaccgcttattgggcttgacagcagacatggaccaagaagaccaagacacccagctagaaggccagctcctgataatagatgagatgtctatggtcgacacctggctggcctaccagctctttaaggctgttcccaaccaaatgcaggtggtcctggtgggagacaaggaccaactgccttccgttggtccgggccaggtttttaaagacctgattgatagtcaagagatcgacaagattgagcttaccgagatttaccgccagaatgatcaatcatcgatcgtttccttggcccaccatatcaaaaatgaggttttaccagctgattttgctagcaaaatggctgaccggtctttcttaccagctgaacctagccaggttgcccaagtgattgaacaagtggtgaccaatgctattgccaaaggttttacggctgaagatatccaggtacttgcccccatgtacaagggacaagcaggcattgaccgtttgaataagttagtccaggaactaatcaacccgcctggccccggcaaaaaagaagttcaatttatcgacacaattttccggattaacgacaaggtcctccaccaggtcaatgatccggaccaaaatgtcttcaatggcgacattggaaagatcacaggtattattccttccaaggaatcccaggtcaatagtgatgaattggtgattgactttgatggtaatgaagtgacctacatgcgcaatgaatggaataaaatcgccttgtcctattgttcttctatccacaagtcccagggtagcgaatacaagatggtcatcctacccttgacttttgactattggcggatgcttcgcaaagaccttctctacacagccgtcacccgggccagtgactttctgatcttatgcggacaaaaagcagcctttaacaagtgcctgactactggggtaaatttgaggaaaaccagcttgaaagaccggctattaaccgataagaccagcttccagctactggatgaaaaagaccagacccaagccagcaagacagaggccggggaaaaagggcaacagccaggtggtccaaaagattacgtcttgactcctgacttggttgattcacaggccatcaatcctatgattgggatggaaggaatcagcctttatgattttttaaactaa

SEQ ID NO: 4992 - protein, 804 aa, Alloiococcus otitidis
MQEEENYVTGRVLAIFFTSPDNYYKVLKIKIKDQDMLYDEGDIVVVGHFGRVQEGEDYTFYGHLTSHPKYGLQFAANRYEDQKPSSEEALISYLSSSKFKGIGPKTAQNIVDELGINALDLILDDPSYLDQVSNLKQDKKDLIAKNVHAERGVQKIILKLNEYGISNELAYRIYAKYEEKTLATIQNNPYQLIYDIKNIGFNKADQIAYEIGIKPDSKERLYAGVVHSLTEDSLNQGHTYLEGETMVEATIRTLEKSQDYIIDPGDLADRIGEMVEAEMIFKDQDHYYLPSLNNSEWGIVSAIERIKSQSSQALSKGYLSDCLAEVEADNDLTYDKGQREAILQAIMSPLFILTGGPGTGKTTVLKGLIQLFAQVHDLSLDPADYPNQAFPILMAAPTGRAAKRMGETTGLPASTIHRLLGLTADMDQEDQDTQLEGQLLIIDEMSMVDTWLAYQLFKAVPNQMQVVLVGDKDQLPSVGPGQVFKDLIDSQEIDKIELTEIYRQNDQSSIVSLAHHIKNEVLPADFASKMADRSFLPAEPSQVAQVIEQVVTNAIAKGFTAEDIQVLAPMYKGQAGIDRLNKLVQELINPPGPGKKEVQFIDTIFRINDKVLHQVNDPDQNVFNGDIGKITGIIPSKESQVNSDELVIDFDGNEVTYMRNEWNKIALSYCSSIHKSQGSEYKMVILPLTFDYWRMLRKDLLYTAVTRASDFLILCGQKAAFNKCLTTGVNLRKTSLKDRLLTDKTSFQLLDEKDQTQASKTEAGEKGQQPGGPKDYVLTPDLVDSQAINPMIGMEGISLYDFLN

SEQ ID NO: 4993 - DNA, 276 bp, Alloiococcus otitidis
  CDS (10)..(273)
acttcttttttgccggggccaggcgggttgattagttcctggactaacttattcaaacggtcaatgcctgcttgtcccttgtacatgggggcaagtacctggatatcttcagccgtaaaacctttggcaatagcattggtcaccacttgttcaatcacttgggcaacctggctaggttcagctggtaagaaagaccggtcagccattttgctagcaaaatcagctggtaaaacctcatttttgatatggtgggccaaggaaacgatcgatgattga

SEQ ID NO: 4994 - protein, 88 aa, Alloiococcus otitidis
MPGPGGLISSWTNLFKRSMPACPLYMGASTWISSAVKPLAIALVTTCSITWATWLGSAGKKDRSAILLAKSAGKTSFLIWWAKETIDD

SEQ ID NO: 4995 - DNA, 888 bp, Alloiococcus otitidis
  CDS (28)..(885)
gacaagaaaggcaaaggacaggggaaaatgaccttatatgaattaaagaattttcaaattgaccaggctatccagctagccttaaaagaggatattaattacgaagatgtcaccagtaatgccatctacacagaagataggctggccgagatttcactcctagccaagggagaggggattttagccggtttagctgtctttaagcgagtctttcaattgcttgacgaccaggtgacctttaaagactacaagcaggaaggggactgggtgaaagattcagacctggttttggaggtccaagccagggtctcttccctcttatctggggaaagggtggccttgaactacttgcagcgaatgagtggaatagccactaatgtcgctcggtatgtggcaaaacttgatgatgactcaattagtgtggtcgacacccgtaaaactacccccaatatgagggttttcgaaaaatacgccgtcaaagtaggaggtgggtttaaccaccgctacaacctgagtgatggaatcttgattaaggacaaccacattgacgccgccggatcaataaaagaagctgtagccaaagtcagggactatacccgctatgtcaaaaaaatcgaagtggaagtcgaaagcttagaaggtgttcaagaggccttagaagcccaagctgatattattatgctagataatatggcgatcgattccattcgagaagccgttaagctcattgacaagcaagctattattgagtgttcaggcaatatcgacctcagtaatgttaaagactaccaaaatcttggcatcgattatttgtctagcggtgccatggtctacaatgccccagttttagacttatccatgaagaacttgacctacttaaaggactag

SEQ ID NO: 4996 - protein, 286 aa, Alloiococcus otitidis
MTLYELKNFQIDQAIQLALKEDINYEDVTSNAIYTEDRLAEISLLAKGEGILAGLAVFKRVFQLLDDQVTFKDYKQEGDWVKDSDLVLEVQARVSSLLSGERVALNYLQRMSGIATNVARYVAKLDDDSISVVDTRKTTPNMRVFEKYAVKVGGGFNHRYNLSDGILIKDNHIDAAGSIKEAVAKVRDYTRYVKKIEVEVESLEGVQEALEAQADIIMLDNMAIDSIREAVKLIDKQAIIECSGNIDLSNVKDYQNLGIDYLSSGAMVYNAPVLDLSMKNLTYLKD

SEQ ID NO: 4997 - DNA, 1149 bp, Alloiococcus otitidis
  CDS (22)..(1146)
acaagaaatgatggtggtgtcatgaaagacaaagtacaaacccgtgttgttgtcggcatgagcgggggcgttgactcttcagtaacagccctacttttaaaagaagccggctacgacgtggttggtatctttatgaagaactgggatgacacagatgaaaatggtgtctgtaccgcgactcaagactataatgatgttgccttggtagccaaccaaatcggcatcccctattattcagttaactttgaagaagaatactgggacaaggtcttccagtatttcttagatgaatacaagaaggggcggacccctaacccagatgtcatgtgcaacaaggaaatcaaatttagagccttcttagactatgccctagacttgggggcagattatgtggcaaccggccactatgcccgtttgctccgggacgcagacgggactgcccacctcttgaagggcttggatggcaataaagatcagacctacttcttgaaccaattgtcccaagaccaattatccaaggtcctctttcccctaggtgacatggacaagaaagaagtccgggctattgctgaaagagccggattagcgactgctaagaaaaaagattccactggtatttgctttatcggtgaacggaactttaaagacttcctaatggactacctgccagcccaaccaggcaatatggagaccctggacggggaagttgtcaaccaacatgacggcttgatgtactataccattggccaacgcaagggtttaggcattggtgggggagtcaaccaccaaaatgaaccttggtttgtcattggtaaagacttggaccggaatgttttattggtcggtcaaggctatgatcatgaccacctctatgctagtcacctagaggcatctgacttttcctttacccaagaagccaaaccccaagagaccttccgttgccaagcgaagttccgctaccggactaaagaagttccggccacagtccactacaatgcccaagacaatacggctagggtcgactttgaccaaactgcccgggcagtcactcctggccaggccattgtcttttatgacggagatgaatgcttgggtggcggaaccatcgaccaggcctacagcgaggacaagcaactccaatatatttaa

SEQ ID NO: 4998 - protein, 375 aa, Alloiococcus otitidis
MKDKVQTRVVVGMSGGVDSSVTALLLKEAGYDVVGIFMKNWDDTDENGVCTATQDYNDVALVANQIGIPYYSVNFEEEYWDKVFQYFLDEYKKGRTPNPDVMCNKEIKFRAFLDYALDLGADYVATGHYARLLRDADGTAHLLKGLDGNKDQTYFLNQLSQDQLSKVLFPLGDMDKKEVRAIAERAGLATAKKKDSTGICFIGERNFKDFLMDYLPAQPGNMETLDGEVVNQHDGLMYYTIGQRKGLGIGGGVNHQNEPWFVIGKDLDRNVLLVGQGYDHDHLYASHLEASDFSFTQEAKPQETFRCQAKFRYRTKEVPATVHYNAQDNTARVDFDQTARAVTPGQAIVFYDGDECLGGGTIDQAYSEDKQLQYI

SEQ ID NO: 4999 - DNA, 315 bp, Alloiococcus otitidis
  CDS (22)..(312)
tcaagctttccctgtatcctcatgcccttcaaaagcatggttacttcattaaatatattggagttgcttgtcctcgctgtaggcctggtcgatggttccgccacccaagcattcatctccgtcataaaagacaatggcctggccaggagtgactgcccgggcagtttggtcaaagtcgaccctagccgtattgtcttgggcattgtagtggactgtggccggaacttctttagtccggtagcggaacttcgcttggcaacggaaggtctcttggggtttggcttcttgggtaaaggaaaagtcagatgcctctag

SEQ ID NO: 5000 - protein, 97 aa, Alloiococcus otitidis
MPFKSMVTSLNILELLVLAVGLVDGSATQAFISVIKDNGLARSDCPGSLVKVDPSRIVLGIVVDCGRNFFSPVAELRLATEGLLGFGFLGKGKVRCL

SEQ ID NO: 5001 - DNA, 354 bp, Alloiococcus otitidis
  CDS (10)..(351)
gaggaagagatgaagtcaaacactcaaagcttgccaggtggcacaacccgctacgggatttccgaccaggctgtccgctataccttaagggacaatgccttttctgttaccaaaaacggtaactttcaatatgaacgtcacttgtccaaacaattgatggacaaaagagcacccaggttaaaaatatctgtcagcaaggacttaactgatctgactatatctacggtagcccccaacggtttaaagaagattgacctctacaagaacgatcagcgccaggatgcccggatctttgccgagcaaatcttggatgacttggtagccaaccgggtccttgaaaaagtagacccataa

SEQ ID NO: 5002 - protein, 114 aa, Alloiococcus otitidis
MKSNTQSLPGGTTRYGISDQAVRYTLRDNAFSVTKNGNFQYERHLSKQLMDKRAPRLKISVSKDLTDLTISTVAPNGLKKIDLYKNDQRQDARIFAEQILDDLVANRVLEKVDP

SEQ ID NO: 5003 - DNA, 1173 bp, Alloiococcus otitidis
  CDS (340)..(1170)
acacttaaaggagatgtaagtttgaaccgaatttatttagaccatgcagccacaagtcccgttcatcctgaagtcgtggaaactatttccgataccctagcccatacttttggcaatgcttcaagtagctatcaaaggggccgggatagtcgggccatcattgaccaagcccggcaagtttttgcttcaagcttgtcttgccaagctgacgaaattgtgatcaccagtgggggtagtgagagcaataatacggctatcataaaaacagcccaagccaatgcagacaagggcaagcatattattacgacagccatcgaacaccagtcagttttaaaacctatgaactacttggaatcacttggttttgaggtgacctatttaccagttaaccaggatggggtggtggacctagatgactttgaccaagccttgagggacgacaccattttggtttctattatgcatggcaataatcaaattggctccttgcaacctatcaaggctatcggggaccgcttggccaaccaccaagccttcttccacaccgatgccgtccagtcttattgcaaggttccaattgacgttaaggacttacaagtcgacttcctgtcagtttcagcccacaaaattaatggccccaaagggattggttttttataccagagacaagggattaacttaccaagtttaatcttaggtggagaccaagaaagcaaaagacgggcagggaccgaaaatatcccttacattgcaggttttgccaaggcggttcaattgcgactggaccactttgatgactatcaagaactggttaaatccttgaagcaaagatttatccaggatttagaccaagaaggtattgactacactattaacgggaatttaaaccagtctttagaccacatcctcaatgtccacctcaagggcgttgaatcagaaaaattgttaatccaacttgacctagacggcgtcgaaactgctgctggatcagcttgtacggccggtaacttgacaaaaagtcatgtcctagtagccctcttgggttctgaccaccctgccttgtcccaaagcctgcgctttagctttggctacggtttaagtttagaggacattgaccaggctgttagtgacctggcccaggctatccaaagacttaaagacaataaccactag

SEQ ID NO: 5004 - protein, 277 aa, Alloiococcus otitidis
MNYLESLGFEVTYLPVNQDGVVDLDDFDQALRDDTILVSIMHGNNQIGSLQPIKAIGDRLANHQAFFHTDAVQSYCKVPIDVKDLQVDFLSVSAHKINGPKGIGFLYQRQGINLPSLILGGDQESKRRAGTENIPYIAGFAKAVQLRLDHFDDYQELVKSLKQRFIQDLDQEGIDYTINGNLNQSLDHILNVHLKGVESEKLLIQLDLDGVETAAGSACTAGNLTKSHVLVALLGSDHPALSQSLRFSFGYGLSLEDIDQAVSDLAQAIQRLKDNNH

SEQ ID NO: 5005 - DNA, 1173 bp, Alloiococcus otitidis; identical to SEQ ID NO: 5003
  CDS (76)..(1170)

SEQ ID NO: 5006 - protein, 365 aa, Alloiococcus otitidis
METISDTLAHTFGNASSSYQRGRDSRAIIDQARQVFASSLSCQADEIVITSGGSESNNTAIIKTAQANADKGKHIITTAIEHQSVLKPMNYLESLGFEVTYLPVNQDGVVDLDDFDQALRDDTILVSIMHGNNQIGSLQPIKAIGDRLANHQAFFHTDAVQSYCKVPIDVKDLQVDFLSVSAHKINGPKGIGFLYQRQGINLPSLILGGDQESKRRAGTENIPYIAGFAKAVQLRLDHFDDYQELVKSLKQRFIQDLDQEGIDYTINGNLNQSLDHILNVHLKGVESEKLLIQLDLDGVETAAGSACTAGNLTKSHVLVALLGSDHPALSQSLRFSFGYGLSLEDIDQAVSDLAQAIQRLKDNNH

SEQ ID NO: 5007 - DNA, 1173 bp, Alloiococcus otitidis; identical to SEQ ID NO: 5003
  CDS (22)..(1170)

SEQ ID NO: 5008 - protein, 383 aa, Alloiococcus otitidis
MNRIYLDHAATSPVHPEVVETISDTLAHTFGNASSSYQRGRDSRAIIDQARQVFASSLSCQADEIVITSGGSESNNTAIIKTAQANADKGKHIITTAIEHQSVLKPMNYLESLGFEVTYLPVNQDGVVDLDDFDQALRDDTILVSIMHGNNQIGSLQPIKAIGDRLANHQAFFHTDAVQSYCKVPIDVKDLQVDFLSVSAHKINGPKGIGFLYQRQGINLPSLILGGDQESKRRAGTENIPYIAGFAKAVQLRLDHFDDYQELVKSLKQRFIQDLDQEGIDYTINGNLNQSLDHILNVHLKGVESEKLLIQLDLDGVETAAGSACTAGNLTKSHVLVALLGSDHPALSQSLRFSFGYGLSLEDIDQAVSDLAQAIQRLKDNNH

SEQ ID NO: 5009 - DNA, 2355 bp, Alloiococcus otitidis
  CDS (25)..(2352)
ataaaaaagacttgctgtggtaaaatgaaaatgcaaaagattgaggatgtgagcggaatgaattttagccaaatgataaaggaccaagacttgtttactgccttcaagggtcttggcctaggaattgaaagagaatgtttgcggactgcaaaggacagtcaactggcccagaccatggctcctaaagccttggggaagagggcagaccacccttatttgatcaccgactttggggaagcccagccggagatcattactcccccagcttctagtatcaatgagacggtccaatggcttcaagccttgcatgatgtttaccttcgttccttggagcatgatgagtatttgtggccctttagcatgcccaatgtcctaccccaagatgatgaaattgacattatccaagtccctgagcagtttgaattagactaccggaactttttagctgaccagtacggcaaaaagttgcaaatgatttctggcatccactttaatttttcctttagccaggactttttagaccggctctaccaggcctattctggtccagatacttttaaggacttcagggacgagctttatcttaaattgacccggaactttttacgctaccactggttgattacctacctctttggggcagccccttatgcggatgggtctttctatgaatcgaccacccaccccaaagaaccacctgcctcttatatgcggagcttgcggaatagttcatatggctaccacaactttaccaatgtccaagtccccttgacttccgttgaggactatgcccacaaaatccaagatttggttcgtgaccaagttattattgaagaacgggagttttacggcgatgcccggcttaagaatagtcaggggtcaagccagactttgttagatgaaggaattgaatatgttgagcttcgctgcatcgatatcgacccttatgctgaatttgggatcagccaggatgagttggaatttatccacctctttttaatggccatggtttggatcgatgaagatgcagatgaggaagccgttgccaaagggaatgacttgaactcaaacattgccaccctccatccccatgaagaaatcccagctgaagcaaaagaagagggatttcgaattttagatgccatgacctacttggttaaacatgcggacctgcccgctagctacctcaaccaggttgaccaagccaaggcggccttaaaagaccctaaattgaccctggctagccagatcatcaaggaccttaaagaaaaagattacctggatatgggacgagatattggtcaggctaacctggccaaggcttgggacaaacctttcttgctccggggtttccaccagatggagatgtccagtcaactccttctttttgatgccatccagcgtgggattgaagcgagagttttggatgaagacgaccagtttctagaattaaactacaagggccatgtggaatatgtccgtaatggtaaccaaaccagcaaggacaattatatttcccattggattatggccaacaagacggtgactaaactgatcttggctgagttgggttaccaggtcccttccggcaaggagtatagttccttggacctagccattgcagactacccggcttataaaaacaaagccctagtcgtcaagcccaagtccaccaattacggcataggtatttctatatttaaaaagcccttcagccaggaagcctatgaaaaagccttggctattgcctttaaagaggactcatccgtcttagtagaagactatattgaaggaacagaataccgcttctttgttattgacggcaaaactcggtcggtcctcttgcgcaagccggctaatgttttaggagatggcaagcatacgattaaggaactgatccaggccaagaatgacgataaattgcgcggggacaaccaccgggccccgctcaccaatatcaaaatgactgaacttgaagccctcatgctggaccaacaaggctatgactttgattcggtgcctaaagagggagaagaagtttatttaagggagaattccaatatttcaactggtggagactctctagaggttagtgaccaagttgatccatcttacaaggcggtggcggaggctatggcccaagaccttgaagtgaaggtttctggcattgaccttatcataccggatattcaccaggccacaacacctgaccagccaggttatactatgattgaaatgaactttaacccagctatgaacatgcacgcttatgtctatgaaggtttgggtcgccggctaacccaggacgtgttaaacatgctttatcctgaactacctaagcgtcccaaccattag

SEQ ID NO: 5010 - protein, 776 aa, Alloiococcus otitidis
MKMQKIEDVSGMNFSQMIKDQDLFTAFKGLGLGIERECLRTAKDSQLAQTMAPKALGKRADHPYLITDFGEAQPEIITPPASSINETVQWLQALHDVYLRSLEHDEYLWPFSMPNVLPQDDEIDIIQVPEQFELDYRNFLADQYGKKLQMISGIHFNFSFSQDFLDRLYQAYSGPDTFKDFRDELYLKLTRNFLRYHWLITYLFGAAPYADGSFYESTTHPKEPPASYMRSLRNSSYGYHNFTNVQVPLTSVEDYAHKIQDLVRDQVIIEEREFYGDARLKNSQGSSQTLLDEGIEYVELRCIDIDPYAEFGISQDELEFIHLFLMAMVWIDEDADEEAVAKGNDLNSNIATLHPHEEIPAEAKEEGFRILDAMTYLVKHADLPASYLNQVDQAKAALKDPKLTLASQIIKDLKEKDYLDMGRDIGQANLAKAWDKPFLLRGFHQMEMSSQLLLFDAIQRGIEARVLDEDDQFLELNYKGHVEYVRNGNQTSKDNYISHWIMANKTVTKLILAELGYQVPSGKEYSSLDLAIADYPAYKNKALVVKPKSTNYGIGISIFKKPFSQEAYEKALAIAFKEDSSVLVEDYIEGTEYRFFVIDGKTRSVLLRKPANVLGDGKHTIKELIQAKNDDKLRGDNHRAPLTNIKMTELEALMLDQQGYDFDSVPKEGEEVYLRENSNISTGGDSLEVSDQVDPSYKAVAEAMAQDLEVKVSGIDLIIPDIHQATTPDQPGYTMIEMNFNPAMNMHAYVYEGLGRRLTQDVLNMLYPELPKRPNH

SEQ ID NO: 5011 - DNA, 372 bp, Alloiococcus otitidis
  CDS (109)..(369)
ggattttcagtggtagctccgattaaaatcaccctgccgctctccaggtgggggaggaggaagtcttgcttgggtttgtctaggcggtggatttcatctaagaggaggatgacattgccactcatttttccctcttcgactaccacctgtaggtcttttttagtgtcggttgccgcattcaatttgcggaaggcatgcttggtggtcccggcgatggcactggcgatacttgttttgccgatgccgggtgggccatataaaatcatggacgaaagttggttggcaaccaccatccgccagataattttattttcaccaaccaggtggtcttggccaacaatatcttcaatggtattgggtctcatacggtaa

SEQ ID NO: 5012 - protein, 87 aa, Alloiococcus otitidis
MTLPLIFPSSTTTCRSFLVSVAAFNLRKACLVVPAMALAILVLPMPGGPYKIMDESWLATTIRQIILFSPTRWSWPTISSMVLGLIR

SEQ ID NO: 5013 - DNA, 372 bp, Alloiococcus otitidis; identical to SEQ ID NO: 5011
  CDS (70)..(369)

SEQ ID NO: 5014 - protein, 100 aa, Alloiococcus otitidis
MGLSRRWISSKRRMTLPLIFPSSTTTCRSFLVSVAAFNLRKACLVVPAMALAILVLPMPGGPYKIMDESWLATTIRQIILFSPTRWSWPTISSMVLGLIR

SEQ ID NO: 5015 - DNA, 1281 bp, Alloiococcus otitidis
  CDS (37)..(1278)
aggaggacaaggatggaccaacccttagcttaccgtatgagacccaataccattgaagatattgttggccaagaccacctggttggtgaaaataaaattatctggcggatggtggttgccaaccaactttcgtccatgattttatatggcccacccggcatcggcaaaacaagtatcgccagtgccatcgccgggaccaccaagcatgccttccgcaaattgaatgcggcaaccgacactaaaaaagacctacaggtggtagtcgaagagggaaaaatgagtggcaatgtcatcctcctcttagatgaaatccaccgcctagacaaacccaagcaagacttcctcctcccccacctggagagcggcagggtgattttaatcggagctaccactgaaaatccctatatctctattcaccctgctatcagaagtcggtgtcatatttttgaattaaaggccttgagtcaagacaatatcaagtcagccttgaaccgggcccttcatgatgagaagaacggcttaggcgcttttcaggtcgaaatcagtgaccaagccctcaaccacctggctcaggctaccaatggcgaccttagaagtagccttaatgccttagaactagccgtcaagtcgaccaaaaaagaccaagacgacagagtccacattgacctagcaactgttgaggaatgcacccagcgcaaggccattagccatgacaaggatggggactcccactatgacgtcatgtcagccttacaaaagtctatccggggtagtgatgtccatgctgccctccactatgccggccggttgattgaagcagatgaactggagactctcagccgacgtttgatggtcacagcttatgaagatattggcctagcaaaccctgcaggagcccaaagagcggttgtagcagttatggcaggggaaaggttgggcctgcctgaagctcggatccctctagccaatgctatcgtggaactctgtctatcagacaagtccaactcagcttacatggctattaatgctgccctaaaagatctcaaccaagccaaggacaagtctgtccctgaccacctcaaagacagccactatgctggagccaaaaaattaggacggggcaaggactacctctacccccactcctatcctggggcctgggtagaccaagcctatttgcctaccgccttacaagggagacgttactaccaacccaaggaaaatagcaaatttgagtccgccctcaaacaccaatatgataagtatgacaaagactcataa

SEQ ID NO: 5016 - protein, 414 aa, Alloiococcus otitidis
MRPNTIEDIVGQDHLVGENKIIWRMVVANQLSSMILYGPPGIGKTSIASAIAGTTKHAFRKLNAATDTKKDLQVVVEEGKMSGNVILLLDEIHRLDKPKQDFLLPHLESGRVILIGATTENPYISIHPAIRSRCHIFELKALSQDNIKSALNRALHDEKNGLGAFQVEISDQALNHLAQATNGDLRSSLNALELAVKSTKKDQDDRVHIDLATVEECTQRKAISHDKDGDSHYDVMSALQKSIRGSDVHAALHYAGRLIEADELETLSRRLMVTAYEDIGLANPAGAQRAVVAVMAGERLGLPEARIPLANAIVELCLSDKSNSAYMAINAALKDLNQAKDKSVPDHLKDSHYAGAKKLGRGKDYLYPHSYPGAWVDQAYLPTALQGRRYYQPKENSKFESALKHQYDKYDKDS

SEQ ID NO: 5017 - DNA, 1281 bp, Alloiococcus otitidis; identical to SEQ ID NO: 5015
  CDS (13)..(1278)

SEQ ID NO: 5018 - protein, 422 aa, Alloiococcus otitidis
MDQPLAYRMRPNTIEDIVGQDHLVGENKIIWRMVVANQLSSMILYGPPGIGKTSIASAIAGTTKHAFRKLNAATDTKKDLQVVVEEGKMSGNVILLLDEIHRLDKPKQDFLLPHLESGRVILIGATTENPYISIHPAIRSRCHIFELKALSQDNIKSALNRALHDEKNGLGAFQVEISDQALNHLAQATNGDLRSSLNALELAVKSTKKDQDDRVHIDLATVEECTQRKAISHDKDGDSHYDVMSALQKSIRGSDVHAALHYAGRLIEADELETLSRRLMVTAYEDIGLANPAGAQRAVVAVMAGERLGLPEARIPLANAIVELCLSDKSNSAYMAINAALKDLNQAKDKSVPDHLKDSHYAGAKKLGRGKDYLYPHSYPGAWVDQAYLPTALQGRRYYQPKENSKFESALKHQYDKYDKDS

SEQ ID NO: 5019 - DNA, 1722 bp, Alloiococcus otitidis
  CDS (145)..(1719)
tcagctttgcgtatcaaaaaaagtcgttcaaaaaattcggtttcttatgccgttattaaagatattactcgtaacggtaagcgcaccactaaaattgtcgaaacactgggcaatcacgaagaaatcaaacaaaaacatcccgaaatggatccagaagaatgggccaaacagcgagccgccgaattaacggaacaggaaaaacagaaaaagcaaaagatcgccattcactacgatccaaccaagaaaataaaaaaagataaacaacaactttttaatgttggttacctctttttacaatccattttagctcagttgaaactccccaccatgacgaaaaaaatcgccaagcagcatcaatttaaatatccgttggatcaaattttatcttgtctcatttacaatcggattttgagtccggcctccaaaaaaagtgcctttgaatttgcccaaaccctattagaaccgcctcaatttcagttacaagatatttaccgcagtcttgatgtcttagctgaacatacccatgatattcaagaacatttttatcgattaagtcagaaagtagcgaaccgggaaactgccgttctctactatgactgcaccaattttttctttgaaatcgaagaagccgaaggcctgaaacaatacgggcattccaaggaaaatcggccgaaccccattgtgcaaatgggattatttatggacggctcgggcattccacttgcttttaatatcacaagcggcaacaccaatgaacaaaccaccctgaaacctttagagaaaagaatccttaaggattttcgcttatcaaaatttgtcgtctgtaccgatgccggtctctcttcaacagccaatcgcaaatacaacaccttaggggagcgtgccttcattaccactcaatcggtcaaaaaaacgaaaaaacatttgaaagactggcttttagataaaagcggttggcgacttagtcatggcaaggaaagctatcacttagacgacattgatgaaaccgctcatttttcagatatcttttataaagaaagatggattcatgaaaatggactcgagcaacgtttcatcgtgagttattccccaaaatatcgccaatatcaagcttctgttcgacaagggcaaattgatcgagctctcaaaaaagttcaggagccttcccggctccaccaaaaaggagcgaatgatgttaatcgcttcatcaaatcaactcatgtcactcaagaaggtgaaattgcccaacaagctgaacatacgattgatcaagatcggatcgaagaagaagcccagtatgatggcttttacgctgtctgcaccaacctcactgaccctgtccaagatatcctttccattaatcaaaagcgatgggaaatcgaagcttctttccgattgatgaaaaacgactttaaatctcgacccgtttatgtccgtaaagatgcccgaattcaagcccattttctcacttgttttctgtccttaacggtttttcggcttcttgaacagaagttagatcatgcctttacttcccatgagatcatccaaaccttgcgtcaaatggaaatgttagaagttcaagatgatgcctatgttccagcctacaaacgcacacggttaacggatcgcttacatgatctttttggttttgaaacggacctcgaaattctctcccaaaaagaaatgaaaaaaattttacgccaatcaaaaaaagccaattag

SEQ ID NO: 5020 - protein, 525 aa, Alloiococcus otitidis
MDPEEWAKQRAAELTEQEKQKKQKIAIHYDPTKKIKKDKQQLFNVGYLFLQSILAQLKLPTMTKKIAKQHQFKYPLDQILSCLIYNRILSPASKKSAFEFAQTLLEPPQFQLQDIYRSLDVLAEHTHDIQEHFYRLSQKVANRETAVLYYDCTNFFFEIEEAEGLKQYGHSKENRPNPIVQMGLFMDGSGIPLAFNITSGNTNEQTTLKPLEKRILKDFRLSKFVVCTDAGLSSTANRKYNTLGERAFITTQSVKKTKKHLKDWLLDKSGWRLSHGKESYHLDDIDETAHFSDIFYKERWIHENGLEQRFIVSYSPKYRQYQASVRQGQIDRALKKVQEPSRLHQKGANDVNRFIKSTHVTQEGEIAQQAEHTIDQDRIEEEAQYDGFYAVCTNLTDPVQDILSINQKRWEIEASFRLMKNDFKSRPVYVRKDARIQAHFLTCFLSLTVFRLLEQKLDHAFTSHEIIQTLRQMEMLEVQDDAYVPAYKRTRLTDRLHDLFGFETDLEILSQKEMKKILRQSKKAN

SEQ ID NO: 5021 - DNA, 1722 bp, Alloiococcus otitidis; identical to SEQ ID NO: 5019
  CDS (7)..(1719)

SEQ ID NO: 5022 - protein, 571 aa, Alloiococcus otitidis
MRIKKSRSKNSVSYAVIKDITRNGKRTTKIVETLGNHEEIKQKHPEMDPEEWAKQRAAELTEQEKQKKQKIAIHYDPTKKIKKDKQQLFNVGYLFLQSILAQLKLPTMTKKIAKQHQFKYPLDQILSCLIYNRILSPASKKSAFEFAQTLLEPPQFQLQDIYRSLDVLAEHTHDIQEHFYRLSQKVANRETAVLYYDCTNFFFEIEEAEGLKQYGHSKENRPNPIVQMGLFMDGSGIPLAFNITSGNTNEQTTLKPLEKRILKDFRLSKFVVCTDAGLSSTANRKYNTLGERAFITTQSVKKTKKHLKDWLLDKSGWRLSHGKESYHLDDIDETAHFSDIFYKERWIHENGLEQRFIVSYSPKYRQYQASVRQGQIDRALKKVQEPSRLHQKGANDVNRFIKSTHVTQEGEIAQQAEHTIDQDRIEEEAQYDGFYAVCTNLTDPVQDILSINQKRWEIEASFRLMKNDFKSRPVYVRKDARIQAHFLTCFLSLTVFRLLEQKLDHAFTSHEIIQTLRQMEMLEVQDDAYVPAYKRTRLTDRLHDLFGFETDLEILSQKEMKKILRQSKKAN

SEQ ID NO: 5023 - DNA, 306 bp, Alloiococcus otitidis
  CDS (7)..(303)
gtggtaatgaaggcacgctcccctaaggtgttgtatttgcgattggctgttgaagagagaccggcatcggtacagacgacaaattttgataagcgaaaatccttaaggattcttttctctaaaggtttcagggtggtttgttcattggtgttgccgcttgtgatattaaaagcaagtggaatgcccgagccgtccataaataatcccatttgcacaatggggttcggccgattttccttggaatgcccgtattgtttcaggccttcggcttcttcgatttcaaagaaaaaattggtgcagtcatag

SEQ ID NO: 5024 - protein, 99 aa, Alloiococcus otitidis
MKARSPKVLYLRLAVEERPASVQTTNFDKRKSLRILFSKGFRVVCSLVLPLVILKASGMPEPSINNPICTMGFGRFSLECPYCFRPSASSISKKKLVQS

SEQ ID NO: 5025 - DNA, 465 bp, Alloiococcus otitidis
  CDS (34)..(462)
aatatacttagaaatagaaatggggtgtcgcaaatgcaagaatacaaaaaagttctagtagggacagatggatccgaaacagccaacttagccttcaagcgagcgatcaattttgctttacaaaataatgcaagcctttacattacacacgtcgttgatacccgggcctccaaaccatatgaagcttttgaccagtcagtctccaacagtatgcggatcgaggctgattccatcttaaaccaatatgaaaaacaagcaagggatgcaggcatccaagatgtccaaactgtcttgaaatacggctcacctaagaagaccatcccacaagtcattagtgaaaagggaatagatatcgtcatcttaggggcaacagggctgaacacctttgaacgcttctttattgggtccgtttccgaatacgtagtccgccgggcagaatgcgatgtcttgattatccgccagtaa

SEQ ID NO: 5026 - protein, 143 aa, Alloiococcus otitidis
MQEYKKVLVGTDGSETANLAFKRAINFALQNNASLYITHVVDTRASKPYEAFDQSVSNSMRIEADSILNQYEKQARDAGIQDVQTVLKYGSPKKTIPQVISEKGIDIVILGATGLNTFERFFIGSVSEYVVRRAECDVLIIRQ

SEQ ID NO: 5027 - DNA, 465 bp, Alloiococcus otitidis; identical to SEQ ID NO: 5025
  CDS (25)..(462)

SEQ ID NO: 5028 - protein, 146 aa, Alloiococcus otitidis
MSQMQEYKKVLVGTDGSETANLAFKRAINFALQNNASLYITHVVDTRASKPYEAFDQSVSNSMRIEADSILNQYEKQARDAGIQDVQTVLKYGSPKKTIPQVISEKGIDIVILGATGLNTFERFFIGSVSEYVVRRAECDVLIIRQ

SEQ ID NO: 5029 - DNA, 1254 bp, Alloiococcus otitidis
  CDS (61)..(1251)
ctgatattcatctttggtaccgggaagagtttaagtaattttaaaggagagaagaaatacatgtcaaaaacgatttcaattaatgcaggaagttctagtctaaaatggaagctatttgaaatgccagacgaagtggttgtcgcttccggtatcgttgaacggatcggcctacctgattccattttcacgattaaatacggagatggccaaaagtatgaaaccacagccgatatccaagaccacgaagttgcggttgaaatgctcttggaacagttgacagagttaaatatcattgaaagttttgatgaaataaccggtgtcgggcaccgtgtcgttgctggtggtgaaaaattcagcgaatctaccttgatcgatgatgatgtgatccaagctatcgaagacttggcagaatttgcccccctccacaatcctgctaatgctaccgggatcaaggctttcaagaaagtcttgcctgatattactagcgtggctgtttttgacacttctttccacacttctatgccgaagaaaaactacctctacagtattccaatgcaatactatgaaaaacacaatgctagacggtatggtgctcatggaactagtcaccgctatgtttctaaccgggcagctgaaatcataggccagccgattgaagatttgaaaattgtgacagcccacttggggaacggtgcctccattacagctgtggacgggggcaagtccgttgatacttctatgggattcactccactagctggtgttaccatgggaacccggtcaggggacattgacccatccttgttgccatttatcatgcgcaaagaaggaattgccgacatcaatgaaatggtccgtatcttaaacaacgaatctggccttaaaggcttgtctggtgtttccagtgacatgcgtgacattgaatcagctgctgctgaaggcaatgaagatgcccaagttgccttagacatcttcaacgaccgtgtccggaaatacattggccagtatgctgcaaccatgaatgggatcgatgtattagtctttactgctggtattggtgaaaatgcggccaatgtccgtcaagctgtagcagatggcctttccttcttaggcttaaaagttgacccagacaaaaatgatgtccgcggtgaggaaagaattatttcaaccgatgattctaaagtcaaagttctcttgatccccaccgatgaggagctaatgattgcccgcgatgtggaagctttaaaagactaa

SEQ ID NO: 5030 - protein, 397 aa, Alloiococcus otitidis
MSKTISINAGSSSLKWKLFEMPDEVVVASGIVERIGLPDSIFTIKYGDGQKYETTADIQDHEVAVEMLLEQLTELNIIESFDEITGVGHRVVAGGEKFSESTLIDDDVIQAIEDLAEFAPLHNPANATGIKAFKKVLPDITSVAVFDTSFHTSMPKKNYLYSIPMQYYEKHNARRYGAHGTSHRYVSNRAAEIIGQPIEDLKIVTAHLGNGASITAVDGGKSVDTSMGFTPLAGVTMGTRSGDIDPSLLPFIMRKEGIADINEMVRILNNESGLKGLSGVSSDMRDIESAAAEGNEDAQVALDIFNDRVRKYIGQYAATMNGIDVLVFTAGIGENAANVRQAVADGLSFLGLKVDPDKNDVRGEERIISTDDSKVKVLLIPTDEELMIARDVEALKD

SEQ ID NO: 5031 - DNA, 258 bp, Alloiococcus otitidis
  CDS (28)..(255)
tccaagctatcgaagacttggcagaatttgcccccctccacaatcctgctaatgctaccgggatcaaggctttcaagaaagtcttgcctgatattactagcgtggctgtttttgacacttctttccacacttctatgccgaagaaaaactacctctacagtattccaatgcaatactatgaaaaacacaatgctagacggtatggtgctcatggaactagtcaccgctatgtttctaaccgggcagctgaaatcatag

SEQ ID NO: 5032 - protein, 76 aa, Alloiococcus otitidis
MPPSTILLMLPGSRLSRKSCLILLAWLFLTLLSTLLCRRKTTSTVFQCNTMKNTMLDGMVLMELVTAMFLTGQLKS

SEQ ID NO: 5033 - DNA, 468 bp, Alloiococcus otitidis
  CDS (61)..(465)
cggacattggccgcattttcaccaataccagcagtaaagactaatacatcgatcccattcatggttgcagcatactggccaatgtatttccggacacggtcgttgaagatgtctaaggcaacttgggcatcttcattgccttcagcagcagctgattcaatgtcacgcatgtcactggaaacaccagacaagcctttaaggccagattcgttgtttaagatacggaccatttcattgatgtcggcaattccttctttgcgcatgataaatggcaacaaggatgggtcaatgtcccctgaccgggttcccatggtaacaccagctagtggagtgaatcccatagaagtatcaacggacttgcccccgtccacagctgtaatggaggcaccgttccccaagtgggctgtcacaattttcaaatcttcaatcggctggcctatgatttcagctgcccggttagaaacatag

SEQ ID NO: 5034 - protein, 135 aa, Alloiococcus otitidis
MVAAYWPMYFRTRSLKMSKATWASSLPSAAADSMSRMSLETPDKPLRPDSLFKIRTISLMSAIPSLRMINGNKDGSMSPDRVPMVTPASGVNPIEVSTDLPPSTAVMEAPFPKWAVTIFKSSIGWPMISAARLET

SEQ ID NO: 5035 - DNA, 468 bp, Alloiococcus otitidis; identical to SEQ ID NO: 5033
  CDS (7)..(465)

SEQ ID NO: 5036 - protein, 153 aa, Alloiococcus otitidis
MAAFSPIPAVKTNTSIPFMVAAYWPMYFRTRSLKMSKATWASSLPSAAADSMSRMSLETPDKPLRPDSLFKIRTISLMSAIPSLRMINGNKDGSMSPDRVPMVTPASGVNPIEVSTDLPPSTAVMEAPFPKWAVTIFKSSIGWPMISAARLET

SEQ ID NO: 5037 - DNA, 321 bp, Alloiococcus otitidis
  CDS (127)..(318)
acaagcttttcactatttaaaagcatgggggctttggcctattttattgtcccctacaatttgtttgaaagccaagaaggtaaagacttactccaattcatccaaaaacatggctaccttcagggaatgattcatttaaacaaggccatgtttcaaaatgaagaggcaagaaaatcgatagtaatactgcaaaaacattccaaagattcgaaacaagctgaggaagttcttttggcaactgcaccagaattcaaccaagctgaagccatgaaagactttttagctgatattcatctttggtaccgggaagagtttaagtaa

SEQ ID NO: 5038 - protein, 64 aa, Alloiococcus otitidis
MIHLNKAMFQNEEARKSIVILQKHSKDSKQAEEVLLATAPEFNQAEAMKDFLADIHLWYREEFK

SEQ ID NO: 5039 - DNA, 321 bp, Alloiococcus otitidis; identical to SEQ ID NO: 5037
  CDS (25)..(318)

SEQ ID NO: 5040 - protein, 98 aa, Alloiococcus otitidis
MGALAYFIVPYNLFESQEGKDLLQFIQKHGYLQGMIHLNKAMFQNEEARKSIVILQKHSKDSKQAEEVLLATAPEFNQAEAMKDFLADIHLWYREEFK

SEQ ID NO: 5041 - DNA, 537 bp, Alloiococcus otitidis
  CDS (73)..(534)
tttttcttcggcatagaagtgtggaaagaagtgtcaaaaacagccacgctagtaatatcaggcaagactttcttgaaagccttgatcccggtagcattagcaggattgtggaggggggcaaattctgccaagtcttcgatagcttggatcacatcatcatcgatcaaggtagattcgctgaatttttcaccaccagcaacgacacggtgcccgacaccggttatttcatcaaaactttcaatgatatttaactctgtcaactgttccaagagcatttcaaccgcaacttcgtggtcttggatatcggctgtggtttcatacttttggccatctccgtatttaatcgtgaaaatggaatcaggtaggccgatccgttcaacgataccggaagcgacaaccacttcgtctggcatttcaaatagcttccattttagactagaacttcctgcattaattgaaatcgtttttgacatgtatttcttctctcctttaaaattacttaaactcttcccggtaccaaagatgaatatcagctaa

SEQ ID NO: 5042 - protein, 154 aa, Alloiococcus otitidis
MKALIPVALAGLWRGANSAKSSIAWITSSSIKVDSLNFSPPATTRCPTPVISSKLSMIFNSVNCSKSISTATSWSWISAVVSYFWPSPYLIVKMESGRPIRSTIPEATTTSSGISNSFHFRLELPALIEIVFDMYFFSPLKLLKLFPVPKMNIS

SEQ ID NO: 5043 - DNA, 537 bp, Alloiococcus otitidis; identical to SEQ ID NO: 5041
  CDS (19)..(534)

SEQ ID NO: 5044 - protein, 172 aa, Alloiococcus otitidis
MWKEVSKTATLVISGKTFLKALIPVALAGLWRGANSAKSSIAWITSSSIKVDSLNFSPPATTRCPTPVISSKLSMIFNSVNCSKSISTATSWSWISAVVSYFWPSPYLIVKMESGRPIRSTIPEATTTSSGISNSFHFRLELPALIEIVFDMYFFSPLKLLKLFPVPKMNIS

SEQ ID NO: 5045 - DNA, 831 bp, Alloiococcus otitidis
  CDS (43)..(828)
aaggatgatgcttgcttgacccaaaaaagtcaggagctttttatgcaagtcgaccagtccattgccttacttcaaagtgggtctgaattttcctacttagagtccttgctggaaacaggggagaacctcctagaccatggccaggtccttgtcagggatggctacccgactgagtcgatcaaaaaagacctggaagagctttatgcaaagattaacctggaagactttgaggcagaggaaatccgccaagcctttcagctagccctcatcaaggggatgcgggaagactatgtccaggtcaaccaccaaatgacaccagattcgatcgccagttttatcgcttacctaatcgaagtcttaacagacccgagatcgaacctgtcactaggcgacttgtcaatcgggacggggaatctaatctggaccatttatcactttttaaacaaggatgggcggaagatccatatcactggtgtggacaacgatgaattactcatttctttagcgtcaatgctgtccgccttgcaagatattcaagcccaacttgtccatggcgatagtctgcaaaacttgttaatcgacccagtggatgtcatggtgagcgatttgcctgttggttattatcccttagaccaacacgcccagaaatttgagacggctaatagggaggggcattcttactcccaccatctcttgattgaacaagcttttcactatttaaaagcatgggggctttggcctattttattgtcccctacaatttgtttgaaagccaagaaggtaaagacttactccaattcatccaaaaacatggctaccttcagggaatga

SEQ ID NO: 5046 - protein, 262 aa, Alloiococcus otitidis
MQVDQSIALLQSGSEFSYLESLLETGENLLDHGQVLVRDGYPTESIKKDLEELYAKINLEDFEAEEIRQAFQLALIKGMREDYVQVNHQMTPDSIASFIAYLIEVLTDPRSNLSLGDLSIGTGNLIWTIYHFLNKDGRKIHITGVDNDELLISLASMLSALQDIQAQLVHGDSLQNLLIDPVDVMVSDLPVGYYPLDQHAQKFETANREGHSYSHHLLIEQAFHYLKAWGLWPILLSPTICLKAKKVKTYSNSSKNMATFRE

SEQ ID NO: 5047 - DNA, 831 bp, Alloiococcus otitidis; identical to SEQ ID NO: 5045
  CDS (16)..(828)

SEQ ID NO: 5048 - protein, 271 aa, Alloiococcus otitidis
MTQKSQELFMQVDQSIALLQSGSEFSYLESLLETGENLLDHGQVLVRDGYPTESIKKDLEELYAKINLEDFEAEEIRQAFQLALIKGMREDYVQVNHQMTPDSIASFIAYLIEVLTDPRSNLSLGDLSIGTGNLIWTIYHFLNKDGRKIHITGVDNDELLISLASMLSALQDIQAQLVHGDSLQNLLIDPVDVMVSDLPVGYYPLDQHAQKFETANREGHSYSHHLLIEQAFHYLKAWGLWPILLSPTICLKAKKVKTYSNSSKNMATFRE

SEQ ID NO: 5049 - DNA, 324 bp, Alloiococcus otitidis
  CDS (40)..(321)
aagttaacaaaaatacaaacaatcctggaggtggaaatcatgttgaaaattgacttacaattcttctctaagaaaaagggtggcggttcaactactaacggtcgtgattccgaagccaaacgcttaggtgctaaagctggtgacggccaaaccgtaactggcggatctattatcttccgtcagcgtgggaccaagatttaccctggtaacaatgttggtcgtggtggcgacgataccttgtttgctaaagttgatggcgttgttaaatttgaacgcaagggacgaagcaaaaaacaagtatctgtttatccagtcgctaactaa

SEQ ID NO: 5050 - protein, 94 aa, Alloiococcus otitidis
MLKIDLQFFSKKKGGGSTTNGRDSEAKRLGAKAGDGQTVTGGSIIFRQRGTKIYPGNNVGRGGDDTLFAKVDGVVKFERKGRSKKQVSVYPVAN

SEQ ID NO: 5051 - DNA, 324 bp, Alloiococcus otitidis; identical to SEQ ID NO: 5049
  CDS (31)..(321)

SEQ ID NO: 5052 - protein, 97 aa, Alloiococcus otitidis
MEIMLKIDLQFFSKKKGGGSTTNGRDSEAKRLGAKAGDGQTVTGGSIIFRQRGTKIYPGNNVGRGGDDTLFAKVDGVVKFERKGRSKKQVSVYPVAN

SEQ ID NO: 5053 - DNA, 372 bp, Alloiococcus otitidis
  CDS (10)..(369)
gaacttaccatgatccaagcccaatttgacttcaaccctgaaggaaagatcctttctttcaccttgcaaggccatgctgatttcgatgagtcaggtaaagatattgtttgttcagctgtatcggccctatcttttaccagcttaaacagtatagaagccctggttggagtagactttaacctaaaccaggctgaccaagaagggggctatttaaaggctgatttcagccagtcttgggataacccagactgtcaacttcttttaaaccacttactgttaggcctgcagggaattgaagagaattatggtgaatacctaaaagttaacaaaaatacaaacaatcctggaggtggaaatcatgttgaaaattga

SEQ ID NO: 5054 - protein, 120 aa, Alloiococcus otitidis
MIQAQFDFNPEGKILSFTLQGHADFDESGKDIVCSAVSALSFTSLNSIEALVGVDFNLNQADQEGGYLKADFSQSWDNPDCQLLLNHLLLGLQGIEENYGEYLKVNKNTNNPGGGNHVEN

SEQ ID NO: 5055 - DNA, 351 bp, Alloiococcus otitidis
  CDS (43)..(348)
actttaaacccttgcccaaaatattttaggaggtgcaacacgatgtatgcaattattcaaaccggtggtaagcaattgaaagttgaagaaggccaagaaatttttgttgaaaaattagatggtcaagcaggtgacactgtgacttttgaccaagtcttactccttggcggtgactcaaccaaagtgggcgaaccctttgtcgacggagctagcgtagaagccaagattgaaaaacaaggacggggtaaaaaggtcacaacctaccgctacttgcgtcgtaaagactcccaccgtaaagttggccaccgtcaaccttacactaaattaacagttcaatcgatcaaggcttaa

SEQ ID NO: 5056 - protein, 102 aa, Alloiococcus otitidis
MYAIIQTGGKQLKVEEGQEIFVEKLDGQAGDTVTFDQVLLLGGDSTKVGEPFVDGASVEAKIEKQGRGKKVTTYRYLRRKDSHRKVGHRQPYTKLTVQSIKA

SEQ ID NO: 5057 - DNA, 696 bp, Alloiococcus otitidis
  CDS (49)..(693)
gtgaaacacataaaattaaaggcttcgagcaatgcttaccggctgattttgtcacaagacgctagcctagcggacctatttgaagaagtgaaactttttaccaaccaactgattaatgttgaccgtgacaaggaccaagccaagctagtcattgaaagccccaaccgaatcctgcccgaatcatggcggactgaagttcaagctttaatccaacggcgggcccaatgggaggtttcctttactagtaacgtgatgagtcatgaaagagctgttgcttggcacaaaaaggttagcctgcaagttgagttcagatcggttctgcctggggaaattctagaagtagatggagatatcctcttggtgggcgatacccccccagctggctaccttagagcaggggggaatatttttatcattggtcgtttagaaggcattgcccatgccggtgtggacggtgaccaagaggcggtcattacgggaactttttccgataagtctgaactccggattgccaaggcctcctactcgattgaccacctcttagatgataaatcgacttatactcctaggagttactacataacggacagaggacagattgaggttgcttcggtagaccaaatccaaaaaattaggcctggcattgaccgggtggtgaaccagcttccttcctatgatgattttgtagaagaatag

SEQ ID NO: 5058 - protein, 215 aa, Alloiococcus otitidis
MSQDASLADLFEEVKLFTNQLINVDRDKDQAKLVIESPNRILPESWRTEVQALIQRRAQWEVSFTSNVMSHERAVAWHKKVSLQVEFRSVLPGEILEVDGDILLVGDTPPAGYLRAGGNIFIIGRLEGIAHAGVDGDQEAVITGTFSDKSELRIAKASYSIDHLLDDKSTYTPRSYYITDRGQIEVASVDQIQKIRPGIDRVVNQLPSYDDFVEE

SEQ ID NO: 5059 - DNA, 696 bp, Alloiococcus otitidis; identical to SEQ ID NO: 5057
  CDS (1)..(693)

SEQ ID NO: 5060 - protein, 231 aa, Alloiococcus otitidis
MKHIKLKASSNAYRLILSQDASLADLFEEVKLFTNQLINVDRDKDQAKLVIESPNRILPESWRTEVQALIQRRAQWEVSFTSNVMSHERAVAWHKKVSLQVEFRSVLPGEILEVDGDILLVGDTPPAGYLRAGGNIFIIGRLEGIAHAGVDGDQEAVITGTFSDKSELRIAKASYSIDHLLDDKSTYTPRSYYITDRGQIEVASVDQIQKIRPGIDRVVNQLPSYDDFVEE

SEQ ID NO: 5061 - DNA, 597 bp, Alloiococcus otitidis
  CDS (82)..(594)
acaacctggaagacgatgcagaccaggataactcggaggaagcagaccctgatcaagcccaagaaagcgaggaaggataggatggaaaagtggaagacctacctatttccctttctaagcttgttggtttttttcttgttggatggcctgctcgcagccttttttaacaataccctacaatttagtttcggctatgcagtgcctcgcttgaccctgcttggcctcatctttttttccttccatttgccggggaaagtcctagccattttggcgattctttttggcctcttgtatgattcttactattccggcatcttgggtgtttacttggcctctttttgcttaattgcttacatcattatccaattgaaaacttatttccaaccaggttgggtggcttatttgtttttagggattttgatgcttttactgaatgaattctttgctttttcggtctttaatgtgattggcttggtccagtcgacttatgcttacttttgggccaaccacgtaggggccagccttattttgaatatcatctttttacttgttttaataccaattttgaccgagataatgaaaagaattgaagaataa

SEQ ID NO: 5062 - protein, 171 aa, Alloiococcus otitidis
MEKWKTYLFPFLSLLVFFLLDGLLAAFFNNTLQFSFGYAVPRLTLLGLIFFSFHLPGKVLAILAILFGLLYDSYYSGILGVYLASFCLIAYIIIQLKTYFQPGWVAYLFLGILMLLLNEFFAFSVFNVIGLVQSTYAYFWANHVGASLILNIIFLLVLIPILTEIMKRIEE

SEQ ID NO: 5063 - DNA, 597 bp, Alloiococcus otitidis; identical to SEQ ID NO: 5061
  CDS (16)..(594)

SEQ ID NO: 5064 - protein, 193 aa, Alloiococcus otitidis
MQTRITRRKQTLIKPKKARKDRMEKWKTYLFPFLSLLVFFLLDGLLAAFFNNTLQFSFGYAVPRLTLLGLIFFSFHLPGKVLAILAILFGLLYDSYYSGILGVYLASFCLIAYIIIQLKTYFQPGWVAYLFLGILMLLLNEFFAFSVFNVIGLVQSTYAYFWANHVGASLILNIIFLLVLIPILTEIMKRIEE

SEQ ID NO: 5065 - DNA, 900 bp, Alloiococcus otitidis
  CDS (37)..(897)
atagttctgctagtggtcctatccaaggctttggtaatgatgtcacggcttttttttggccaggccttctccaaaccgaccaatgccataacgactgcctttgattcggtagaagacattgaaaatgcttttgaagaaaaccaagccttaagaagacaggtggaccaagtttacgaaaaagatgcagaaataaacaatttaagagaagaaaacgagcagttaaaagaggagctaaacttggacgaaagcctgagtgactacaccactctgtcagctaatgtcatctcccgcaaccccgaccgctgggttgataatttaattattgacgttggctcatcagatgggatcagtcaaaatatggcggccatgagccagaacggtctgttgggggtcattactgaagttaaccaagcctctagcaaggtgaccctgatcaccaatattgaagcgacttccaaccgggtctcagcccaaattgtatctgaagaagctgaagatgaagccatctacggggttgtatcggactacctagtggacgataatgagctcttgatgacccaaatcacttccgatgaagggattgaagaaggagacttggtgacaacatcgggcttgggtggcttattccctagtggcttagtgattgggcgggtgacagaagtagccctagacaaccagggcttaggccacattgtccacattgaaccggaaaccaatttcaataccaccaagtttgtaacggtcattgaccggcaagctaaaagcatcttccctgaagatgaagcagaccaagaaaatccggaagatgaagaagatctagacaacctggaagacgatgcagaccaggataactcggaggaagcagaccctgatcaagcccaagaaagcgaggaaggatag

SEQ ID NO: 5066 - protein, 287 aa, Alloiococcus otitidis
MMSRLFFGQAFSKPTNAITTAFDSVEDIENAFEENQALRRQVDQVYEKDAEINNLREENEQLKEELNLDESLSDYTTLSANVISRNPDRWVDNLIIDVGSSDGISQNMAAMSQNGLLGVITEVNQASSKVTLITNIEATSNRVSAQIVSEEAEDEAIYGVVSDYLVDDNELLMTQITSDEGIEEGDLVTTSGLGGLFPSGLVIGRVTEVALDNQGLGHIVHIEPETNFNTTKFVTVIDRQAKSIFPEDEADQENPEDEEDLDNLEDDADQDNSEEADPDQAQESEEG

SEQ ID NO: 5067 - DNA, 900 bp, Alloiococcus otitidis; identical to SEQ ID NO: 5065
  CDS (31)..(897)

SEQ ID NO: 5068 - protein, 289 aa, Alloiococcus otitidis
MVMMSRLFFGQAFSKPTNAITTAFDSVEDIENAFEENQALRRQVDQVYEKDAEINNLREENEQLKEELNLDESLSDYTTLSANVISRNPDRWVDNLIIDVGSSDGISQNMAAMSQNGLLGVITEVNQASSKVTLITNIEATSNRVSAQIVSEEAEDEAIYGVVSDYLVDDNELLMTQITSDEGIEEGDLVTTSGLGGLFPSGLVIGRVTEVALDNQGLGHIVHIEPETNFNTTKFVTVIDRQAKSIFPEDEADQENPEDEEDLDNLEDDADQDNSEEADPDQAQESEEG

SEQ ID NO: 5069 - DNA, 900 bp, Alloiococcus otitidis; identical to SEQ ID NO: 5065
  CDS (13)..(897)

SEQ ID NO: 5070 - protein, 295 aa, Alloiococcus otitidis
MVLSKALVMMSRLFFGQAFSKPTNAITTAFDSVEDIENAFEENQALRRQVDQVYEKDAEINNLREENEQLKEELNLDESLSDYTTLSANVISRNPDRWVDNLIIDVGSSDGISQNMAAMSQNGLLGVITEVNQASSKVTLITNIEATSNRVSAQIVSEEAEDEAIYGVVSDYLVDDNELLMTQITSDEGIEEGDLVTTSGLGGLFPSGLVIGRVTEVALDNQGLGHIVHIEPETNFNTTKFVTVIDRQAKSIFPEDEADQENPEDEEDLDNLEDDADQDNSEEADPDQAQESEEG

SEQ ID NO: 5071 - DNA, 207 bp, Alloiococcus otitidis
  CDS (1)..(204)
atggaaaatggaagagtaaaatggtttaatgcagaaaaaggttttggctttattgaacgtgaaggtgctgatgacgtctttgttcacttttcagctattaatgacgaaggattcaaaaccttagaagaaggtcaagaagtaacttttgagattgaagaaggcgctcgtggcccacaagctgctaacgttaacaaacaagcacaataa

SEQ ID NO: 5072 - protein, 68 aa, Alloiococcus otitidis
MENGRVKWFNAEKGFGFIEREGADDVFVHFSAINDEGFKTLEEGQEVTFEIEEGARGPQAANVNKQAQ

SEQ ID NO: 5073 - DNA, 1413 bp, Alloiococcus otitidis
  CDS (202)..(1410)
aaaagcttgatcttgctttcacttgcggttaaacttattattggaaaaatcatttcgaggaaggatgtttgtcaaatgagtctgcaaaaatggactgatcaaataccagaaatcactaaaatcgggaactaccagcccctcttctgggtaaatgataactatgaaggggtcatagccgccaataaaaagtcctcttattcaatggatgatatcgaagatgcctcggcaagattggaccgttttgctgcttattttgcaaagtattttcctgagacccaagataatgatggaatcattgagtctgaactaactgccattccccatatgaagggctttttagaagactactatgatgttcagatccaaggtgacctttacttaaagcgggatgacacccttcccattgccggtaccatcaaagcaagaggggccatttacgaggttcttaaacatgccgaagacttagccttggaacaagggatcttaaccagttatgaggatgactacaccaagtttggcagtcaatcattcaaaaacttctttgctgattacaaggttatggtaggaactacgggcaacctgggtatcagcgtgggtgttatggctgcagctttaggctttgatgtgaccatccatatgtctgacgaagccaaagaatggaagaaaaaccacttgcgagaaaaaggggtgaccgttgttgaacacaagactaactttaccgaagcggtccaacacggccgggtccaatcccaagcagaccctcaatcttacttcgtagacgatgaacactccgtcgacctctttttgggctacacagttgctgccctccgcttacaaaagcaattagaggaagctggtattcccgttgacgccgaccaccccctctttatctactccccttgtggcattgggggcagtccgggcggagtcaacttcggcctcaagcaagtttttggtgaccatgtccattccttcttcgcccaacccacccatatgccttctatgctagtgggacttttgactaaggaatatgataaggtatcagttgcagactttggcatcgatgccaagaccaatatggacggtctggcagttcctagaacttccggttttgtggcggaactcatgcaccactactttaatggtggcttaacagtttcagaagaagaccaaaaagccctcttaagcaaaatgattgacttggaagacattcacctggaaccggctgccctagctggtctgcctggtccggcctacctcttctctagccaagaaggccaaacctacctagaccaaaacaatttactggataaaatggcccaagctaaccatatcgcctgggcaactgggggtagcatggttccaaaagaagagatgaaggccttctaccagaaaggtttagcctatttataa

SEQ ID NO: 5074 - protein, 403 aa, Alloiococcus otitidis
MDDIEDASARLDRFAAYFAKYFPETQDNDGIIESELTAIPHMKGFLEDYYDVQIQGDLYLKRDDTLPIAGTIKARGAIYEVLKHAEDLALEQGILTSYEDDYTKFGSQSFKNFFADYKVMVGTTGNLGISVGVMAAALGFDVTIHMSDEAKEWKKNHLREKGVTVVEHKTNFTEAVQHGRVQSQADPQSYFVDDEHSVDLFLGYTVAALRLQKQLEEAGIPVDADHPLFIYSPCGIGGSPGGVNFGLKQVFGDHVHSFFAQPTHMPSMLVGLLTKEYDKVSVADFGIDAKTNMDGLAVPRTSGFVAELMHHYFNGGLTVSEEDQKALLSKMIDLEDIHLEPAALAGLPGPAYLFSSQEGQTYLDQNNLLDKMAQANHIAWATGGSMVPKEEMKAFYQKGLAYL

SEQ ID NO: 5075 - DNA, 1413 bp, Alloiococcus otitidis; identical to SEQ ID NO: 5073
  CDS (76)..(1410)

SEQ ID NO: 5076 - protein, 445 aa, Alloiococcus otitidis
MSLQKWTDQIPEITKIGNYQPLFWVNDNYEGVIAANKKSSYSMDDIEDASARLDRFAAYFAKYFPETQDNDGIIESELTAIPHMKGFLEDYYDVQIQGDLYLKRDDTLPIAGTIKARGAIYEVLKHAEDLALEQGILTSYEDDYTKFGSQSFKNFFADYKVMVGTTGNLGISVGVMAAALGFDVTIHMSDEAKEWKKNHLREKGVTVVEHKTNFTEAVQHGRVQSQADPQSYFVDDEHSVDLFLGYTVAALRLQKQLEEAGIPVDADHPLFIYSPCGIGGSPGGVNFGLKQVFGDHVHSFFAQPTHMPSMLVGLLTKEYDKVSVADFGIDAKTNMDGLAVPRTSGFVAELMHHYFNGGLTVSEEDQKALLSKMIDLEDIHLEPAALAGLPGPAYLFSSQEGQTYLDQNNLLDKMAQANHIAWATGGSMVPKEEMKAFYQKGLAYL

SEQ ID NO: 5077 - DNA, 1413 bp, Alloiococcus otitidis; identical to SEQ ID NO: 5073
  CDS (7)..(1410)

SEQ ID NO: 5078 - protein, 468 aa, Alloiococcus otitidis
MILLSLAVKLIIGKIISRKDVCQMSLQKWTDQIPEITKIGNYQPLFWVNDNYEGVIAANKKSSYSMDDIEDASARLDRFAAYFAKYFPETQDNDGIIESELTAIPHMKGFLEDYYDVQIQGDLYLKRDDTLPIAGTIKARGAIYEVLKHAEDLALEQGILTSYEDDYTKFGSQSFKNFFADYKVMVGTTGNLGISVGVMAAALGFDVTIHMSDEAKEWKKNHLREKGVTVVEHKTNFTEAVQHGRVQSQADPQSYFVDDEHSVDLFLGYTVAALRLQKQLEEAGIPVDADHPLFIYSPCGIGGSPGGVNFGLKQVFGDHVHSFFAQPTHMPSMLVGLLTKEYDKVSVADFGIDAKTNMDGLAVPRTSGFVAELMHHYFNGGLTVSEEDQKALLSKMIDLEDIHLEPAALAGLPGPAYLFSSQEGQTYLDQNNLLDKMAQANHIAWATGGSMVPKEEMKAFYQKGLAYL

SEQ ID NO: 5079 - DNA, 759 bp, Alloiococcus otitidis
  CDS (76)..(756)
aatattttaaataaaaaaataaaaaagtcctttctttgcgtatcttatagtaagaccagagaaaggacttttattatgtcaaaaacactttttaatgtcatgccagaccatgttaaacctagagaacgtctaaaggagtgtggggctaatgccttgtccaaccaagaacttctggccatccttttaaggacagggaccaaggagtttgatgtcatccacttggccatgcaggttttagaccgggtgggggacctttcggaattgaaggtcatctccatggaagagttgactgctatcaaagggattggcccttccaaggcagtggaagttttggctgctattgagctgggcaagcggatctaccggtccaaatcggctaagggagctactgttaactctagccaatgggtgggccagtatatgattgacgaaattggcggacttcaccaggaaaatgttctggccttgtatttgaatactaaaaaccaaattatcaagcaggagttagtctttaaggggtccttaaccaatagtattgcccatccccgggagatcttccggatcggtatccggtcttcagcagccagcatcattattggtcacaaccaccctagtggcaatccggaaccctcccaagctgatattgctttcaccaggaggatggaagaagcaggtgacttaatcgggattcaattgcttgaccatattatagtgggggaagattctttttgctcaatgaggggggaaggatacctctga

SEQ ID NO: 5080 - protein, 227 aa, Alloiococcus otitidis
MSKTLFNVMPDHVKPRERLKECGANALSNQELLAILLRTGTKEFDVIHLAMQVLDRVGDLSELKVISMEELTAIKGIGPSKAVEVLAAIELGKRIYRSKSAKGATVNSSQWVGQYMIDEIGGLHQENVLALYLNTKNQIIKQELVFKGSLTNSIAHPREIFRIGIRSSAASIIIGHNHPSGNPEPSQADIAFTRRMEEAGDLIGIQLLDHIIVGEDSFCSMRGEGYL

SEQ ID NO: 5081 - DNA, 663 bp, Alloiococcus otitidis
  CDS (13)..(660)
aagagggttaggatgacagattttaaagcagtcatttttgacatggatggattgatgtttgataccgaaactatttatttccaggccaaccaaaaaacagctgaccgggtcggtttaaactttagcaaggacttctatctggaccatgttggggggagcgagcgtgacttcttccaagccatgtacgaccattttgaagagaaagacaaggttgaccgctttatggaagaatctcaaaaagatgtttatgacctcttaacctctgaccaggtccctaaaaaagaaggcttaatggacctcttagactacttgcaaaaagagaggattaagatggtcgttgcttccagctcagataaatggttggtggacaaggtagtcaccatcaatggggtcaaggactactttgtcgacttggttggaggcgatgaagtagaccagaccaaacctgagccagatattttcctgatggccctagacaagctaggaacaagcaaggatgaaactttggtcttagaagactccttgaacggggtccgggctggtcatgcagccggcttagccaccattatgattcccgacctaatccagcctgggccggaagccaaatcgaaaagtctagccattgaagaaaatttaagacaagttataaaatattttaaataa

SEQ ID NO: 5082 - protein, 216 aa, Alloiococcus otitidis
MTDFKAVIFDMDGLMFDTETIYFQANQKTADRVGLNFSKDFYLDHVGGSERDFFQAMYDHFEEKDKVDRFMEESQKDVYDLLTSDQVPKKEGLMDLLDYLQKERIKMVVASSSDKWLVDKVVTINGVKDYFVDLVGGDEVDQTKPEPDIFLMALDKLGTSKDETLVLEDSLNGVRAGHAAGLATIMIPDLIQPGPEAKSKSLAIEENLRQVIKYFK

SEQ ID NO: 5083 - DNA, 2676 bp, Alloiococcus otitidis
  CDS (13)..(2673)
aaagtagggattatgatgacaagtgataaagcaagtcagatgccaagtaaatataacccccaagctgtagaggagggacgctacaaggattgggtagatgcgggcttatttaagcccagctccgatggggacgttgaagcctattcggtagttattcctccacccaatgtaactggcaagctccacctaggtcatgcttgggataccagcttgcaggatattattgtccgccgtaaacggatgcagggctatgataccctctggctccccggcatggaccatgcggggattgcgacccaagccaaggtagaagagaaaatccggaatgaagaaggtttaagccggtatgatttaggccgggatgcctttatcgatcgggtttgggattggaaagaagaatatgctaaaaatatcagggaccagtgggctaaaattggcttatcagtggactattcccatgaacgctttacccttgaccaaggcttgaacaaggcagttaacaaggtctttgtcgacctttacaacaagggcttgatctaccgtggtgagtacattataaactgggacccagttgcccaaacagctttaagtgatattgaggtcatccacaaggaagtccagggtgccttctaccacatgacctatcctctctctgatgggtcaggccaggttgagattgccactacacggccggaaactatgctaggtgatagcggggtcgctgtccaccccgatgatgaacgttaccaatcttacattggcaagtccctgaccctgcctttgctgggccgggaaattccgattgtcgcagaccgctatgttgatatggaatttggaactggggtcgtcaaggtgaccccagcccatgacccaaatgactttgagattggaaaccgtcatgaccttgaacgtattaatgtcatgaatgctgacgggactatgaatgaaaatgcaggagcctaccaaggcttagaccggtttgatgcccgcaagcaggttgttgctgacttaaaagaccaaggcaacctggtgaaagtagaagactacacccacagtgtcggccactcggagcggtcagatgcagttgtggaaccccgcttgtccacccagtggtttgttaagatggacggcttggctgaccgggccttggccaaccaaaaaacagacgataaggtcgactttgttccaggccggtttgagaaaacctttaccgactggatggaaaatgttcatgactgggttatttcaagacaactttggtggggccaccaaattcctgcttggtaccacaaagaaacggaagaagtttatgtaggcgaagaggcaccagaagatagtgaaaattgggaccaggatcccgatgtcttggacacctggttcagttcagctctttggcctttttcgaccatgggctggccggaagaagacaatccaacctttaaacgttacttcccaaccaataccctagtgactggttatgacattatcttcttctgggttgcccggatgatctttcagtctcttgaatttactggccgccgtccctttgaacatgtcctgatccacggtttgattcgggctgaagatggccaaaaaatgtccaagtccttgggcaacggtattgacccgatggacgtgattgaccagtatggtgccgattccttgcgttggttcctcaccaatgggtcgaccccaggccaagacatccgcttctcatacgaaaaaatggatgcggcttggaattttatcaataagatctggaatgcttcccgatacgtgatcttaaacctaggggatatggcctaccaagacattgaccttgctggagaccagactgtggctgaccagtggatcttggcccggctccatgaaaccatcgccgtggttaacgaccatgccgataagtttgaattctctctggcaggcaaggctctctatcacttcatttgggatgactactgtgattggtatattgaaatgaccaaggaaatcttggatgaaggcagtcctgaccaaaaagacatggccaaaagtgtcttagcctatgtcttgaatgccatattgcgacttctccaccccttcatgccttttgtgaccgaagagatctaccaacatgtcccccaccaagggaattcgattgtgaccgctccttatcctgaggcagatggccagttcagtaacccagaagccatttccaatatgagtaccttgattgatttaatccaagctgtccggtcgatccgggctgaatcaaaccggcccttgtcgcaaggaattgacctgttgatcaaggccaaggatgaccaagtggaagacttcttaagagccaaccagtcctttatccaccgcttctgtaaccccgataacttggagatcggtcaagatccacaagtccctaaagaagtgaagtcggctgtcgcttcaggggttgaaatttttatccccctagctggcttggttgattttgaccaagaaattgcccgcctggagaaagaacttgctaagtggcaaggcgaaatcgaccgggtagagggcaaacttgccaatgagaaatttgtcaataacgcgcccgaaaaaattgtccaagaggaaagagacaagggggtccagtaccaagagcggtatgaagcggtcaaagaccaattaagcaatatgagagaaatgaaagagggttag

SEQ ID NO: 5084 - protein, 887 aa, Alloiococcus otitidis
MMTSDKASQMPSKYNPQAVEEGRYKDWVDAGLFKPSSDGDVEAYSVVIPPPNVTGKLHLGHAWDTSLQDIIVRRKRMQGYDTLWLPGMDHAGIATQAKVEEKIRNEEGLSRYDLGRDAFIDRVWDWKEEYAKNIRDQWAKIGLSVDYSHERFTLDQGLNKAVNKVFVDLYNKGLIYRGEYIINWDPVAQTALSDIEVIHKEVQGAFYHMTYPLSDGSGQVEIATTRPETMLGDSGVAVHPDDERYQSYIGKSLTLPLLGREIPIVADRYVDMEFGTGVVKVTPAHDPNDFEIGNRHDLERINVMNADGTMNENAGAYQGLDRFDARKQVVADLKDQGNLVKVEDYTHSVGHSERSDAVVEPRLSTQWFVKMDGLADRALANQKTDDKVDFVPGRFEKTFTDWMENVHDWVISRQLWWGHQIPAWYHKETEEVYVGEEAPEDSENWDQDPDVLDTWFSSALWPFSTMGWPEEDNPTFKRYFPTNTLVTGYDIIFFWVARMIFQSLEFTGRRPFEHVLIHGLIRAEDGQKMSKSLGNGIDPMDVIDQYGADSLRWFLTNGSTPGQDIRFSYEKMDAAWNFINKIWNASRYVILNLGDMAYQDIDLAGDQTVADQWILARLHETIAVVNDHADKFEFSLAGKALYHFIWDDYCDWYIEMTKEILDEGSPDQKDMAKSVLAYVLNAILRLLHPFMPFVTEEIYQHVPHQGNSIVTAPYPEADGQFSNPEAISNMSTLIDLIQAVRSIRAESNRPLSQGIDLLIKAKDDQVEDFLRANQSFIHRFCNPDNLEIGQDPQVPKEVKSAVASGVEIFIPLAGLVDFDQEIARLEKELAKWQGEIDRVEGKLANEKFVNNAPEKIVQEERDKGVQYQERYEAVKDQLSNMREMKEG

SEQ ID NO: 5085 - DNA, 294 bp, Alloiococcus otitidis
  CDS (22)..(291)
ccctctttcatttctctcatattgcttaattggtctttgaccgcttcataccgctcttggtactggacccccttgtctctttcctcttggacaattttttcgggcgcgttattgacaaatttctcattggcaagtttgccctctacccggtcgatttcgccttgccacttagcaagttctttctccaggcgggcaatttcttggtcaaaatcaaccaagccagctagggggataaaaatttcaacccctgaagcgacagccgacttcacttctttagggacttgtggatcttga

SEQ ID NO: 5086 - protein, 90 aa, Alloiococcus otitidis
MLNWSLTASYRSWYWTPLSLSSWTIFSGALLTNFSLASLPSTRSISPCHLASSFSRRAISWSKSTKPARGIKISTPEATADFTSLGTCGS

SEQ ID NO: 5087 - DNA, 1254 bp, Alloiococcus otitidis
  CDS (34)..(1251)
acccgtcagacaaagcaagtaaaggaaggtcttatgcaaattgatgaaatattaatccgttacggcgaattatccaccaaggggaaaaatattaaagactttataaaaaccttggcctcgaatgttagccaggctgttgctgacttagaccaggttgagttgacctggtccagggaccggatgcatgtcaaggttaataatcctgaccaaggccaggaaattatggaccgcttacaaaaggtctttggtatccaaaacctatctcctgccattaaagtagggaaagacttggaccaggtgaaagaccaggtcgctagcctagcccaggataagtttcagccggggatgacctttaaaattgatacccaccgggcggaccatgactatccttataactccatggaactcaaccggattttaggctctgctgttatccaggcccaacccggtttcaaagcccaaatggaagagcctgacttgcagatccgggttgagtttaggcaggatgctgtttatctttcaactgacaccttgcctggtgccaagggacttccggtcgggacggctggcaagggaagtttaatgctgtcaggcggaattgattcaccagttgccggctacctatccatgaaacggggtatgatagttgaagctgtccacttccacagtccaccctacacctcgcctcaagccttggctaaggccaaggacttggctggaaaaatcgccaaatttggcggacctgttacctttatcgaagtgccttttgcccacatccaagaggccatcaaggagcaaatacccgaaggttacaccatgaccatcactagacggatgatgctccggctgacagaccgaattcgccaagaccggggcagtcaggcaattataacaggcgaatctttaggccaggtggcttctcagaccttggaaagcatgcaagccattaatgctgtcaccactaccccggtcttaagacccctggtggctatggacaaaaatgaaatcattgacttgtcccgggtgattgacacctatgacttggccaccctcccttatgaggattgttgtaccatttttgccccgactaagccaaagaccaagcccaaggttgacaatgccatccgctatgaacaagccttagatattgaggacttaatggaccaggccttagctagtcttaaaattgagactatctatcctggacagctggttgaagaccaagaaaaagaagaatttgactctattttataa

SEQ ID NO: 5088 - protein, 406 aa, Alloiococcus otitidis
MQIDEILIRYGELSTKGKNIKDFIKTLASNVSQAVADLDQVELTWSRDRMHVKVNNPDQGQEIMDRLQKVFGIQNLSPAIKVGKDLDQVKDQVASLAQDKFQPGMTFKIDTHRADHDYPYNSMELNRILGSAVIQAQPGFKAQMEEPDLQIRVEFRQDAVYLSTDTLPGAKGLPVGTAGKGSLMLSGGIDSPVAGYLSMKRGMIVEAVHFHSPPYTSPQALAKAKDLAGKIAKFGGPVTFIEVPFAHIQEAIKEQIPEGYTMTITRRMMLRLTDRIRQDRGSQAIITGESLGQVASQTLESMQAINAVTTTPVLRPLVAMDKNEIIDLSRVIDTYDLATLPYEDCCTIFAPTKPKTKPKVDNAIRYEQALDIEDLMDQALASLKIETIYPGQLVEDQEKEEFDSIL

SEQ ID NO: 5089 - DNA, 1158 bp, Alloiococcus otitidis
  CDS (181)..(1155)
agaaaggagaggcaaatgatctactttgataacagtgctacaacccccatttatcctcaagccttggagtcttatgtgaaggttagtcaacattactttggcaacccctccagcttgcaccagttgggggagacagcttccaagctcttgaaccaagcccgctaccaaattgccaaaattatgggggttatgccttcagaaatttactttacttccggagggtctgaaggggacaactgggtcatcaaggggactgcccgagcgaagtctttctacggcaagcacctgattacttctaagattgaacacccggcagtcatgaacaccatgaaagagctagaggaccagggatttgaagttacttatttgaatgtcgaccaaaaaggttacattgacctagaagaactcaaagatgccttgcgtccggataccatcctcctctcccttatagctgtgaacaatgaaatgggggttgtccagcccattgaagctatttcagagatcctaaaagactatccgagtgtccacttccacctggatgctgtgcaaacagtgggccaggttgaccttcacctaggagaggagagcagggtcgacatggctgtcttctctggccataaattccacggtccaagaggagtgggcttcgtctacgtgaagtccggtaagaacttgacccctttagttgaaggaggcggacaggaaggaaataaaagaagtgggacagaaaacctaccggctatcgttgccatggctaaggccttgcggatggtcacagaccaagcaggccaaagtcaacttccgaaactccgggacaaactcctgaagggactagtcaaatatcccgatattgacctattttccccacaagagggggcgccccatatcttgacctttggcattcagaatgtcaggggggaagtgacggtccatgcctttgaggaagaagatatctacctgtccacgacttcggcttgctctagccggtcaaaccgagagtcttccaccctcctagctatgggagtgaagccgggccatgcgcaaacggctgtccggatcagtttatcttttgataataacctagaagaagttgatgaatttttaagggttctagataaagtttaccagcaatttgaacccgtcagacaaagcaagtaa

SEQ ID NO: 5090 - protein, 325 aa, Alloiococcus otitidis
MGVMPSEIYFTSGGSEGDNWVIKGTARAKSFYGKHLITSKIEHPAVMNTMKELEDQGFEVTYLNVDQKGYIDLEELKDALRPDTILLSLIAVNNEMGVVQPIEAISEILKDYPSVHFHLDAVQTVGQVDLHLGEESRVDMAVFSGHKFHGPRGVGFVYVKSGKNLTPLVEGGGQEGNKRSGTENLPAIVAMAKALRMVTDQAGQSQLPKLRDKLLKGLVKYPDIDLFSPQEGAPHILTFGIQNVRGEVTVHAFEEEDIYLSTTSACSSRSNRESSTLLAMGVKPGHAQTAVRISLSFDNNLEEVDEFLRVLDKVYQQFEPVRQSK

SEQ ID NO: 5091 - DNA, 1158 bp, Alloiococcus otitidis; identical to SEQ ID NO: 5089
  CDS (16)..(1155)

SEQ ID NO: 5092 - protein, 380 aa, Alloiococcus otitidis
MIYFDNSATTPIYPQALESYVKVSQHYFGNPSSLHQLGETASKLLNQARYQIAKIMGVMPSEIYFTSGGSEGDNWVIKGTARAKSFYGKHLITSKIEHPAVMNTMKELEDQGFEVTYLNVDQKGYIDLEELKDALRPDTILLSLIAVNNEMGVVQPIEAISEILKDYPSVHFHLDAVQTVGQVDLHLGEESRVDMAVFSGHKFHGPRGVGFVYVKSGKNLTPLVEGGGQEGNKRSGTENLPAIVAMAKALRMVTDQAGQSQLPKLRDKLLKGLVKYPDIDLFSPQEGAPHILTFGIQNVRGEVTVHAFEEEDIYLSTTSACSSRSNRESSTLLAMGVKPGHAQTAVRISLSFDNNLEEVDEFLRVLDKVYQQFEPVRQSK

SEQ ID NO: 5093 - DNA, 339 bp, Alloiococcus otitidis
  CDS (16)..(336)
aactcttggccaagcttgtctgaagagttaaaccggccccggttaaaagtcgaaaaaatccatgacttaatccgaatttgccaggaagaggttaacaagttagaccaagagaccgaaaagctcttggcccatgctaatttaactgaattaatggcccagaagctttaccagtacaaggaccaagaaggggatgtggaccaggccatcgcccagagtgagaaacttttcaatgaggactatgactacgagtcttcctatatggttgtccgcaacaaactcagtcaaataaatcctgacctagtccagtctatccaagacgattacaaagaagaccaataa

SEQ ID NO: 5094 - protein, 107 aa, Alloiococcus otitidis
MSEELNRPRLKVEKIHDLIRICQEEVNKLDQETEKLLAHANLTELMAQKLYQYKDQEGDVDQAIAQSEKLFNEDYDYESSYMVVRNKLSQINPDLVQSIQDDYKEDQ

SEQ ID NO: 5095 - DNA, 825 bp, Alloiococcus otitidis
  CDS (55)..(822)
ccagttggggtgaccatgaagacgggtcggtccgttatcttgcacctccacgacatgttggaagagatgcaggcctacctggatgatatccctaaaatcattgaccaaatcaaccaggacttttaccctcaaatagaagaaattgagtcttcttttgaccagctcatcaatgagggctttgtttttaatgggcctcctattccccaggaagtggagtctgtcgaagacaggatccaagaactagaccagttaattggtggtctgcaacttgcccaggccaaggaattagcggagaccatttccttggatatagaccagatctatgaaagaatggaagtcgaaatttctgctaaaaatgaaagtgaccagttgattccatcggtccaaaaagccttatattacttaagggaagaagtccgggtcctcttttttgaaattgaccgggtgtcccaaagctatgtcctaatacacaatgaagcagaccaaatccgcgagttaagagattcagttgagttcctagaaggcaagtttgacaagattgtcgataacctagacaataacttcacggcctattccgaagctcttaaaaacctcaatttcatcaagtctgaactgatttccttaaatgatgtcaagaatgctgtgactgaccagctatatggctaccgagatgaagaagttcaattgaaggaccagctcaacaaaatggaaaggaaggctaaggggcttcggcgccggatcctccgggaaaacttacccggtgttccggctagctacagtgagtactatacctatgtaatgaaactcttggccaagcttgtctga

SEQ ID NO: 5096 - protein, 256 aa, Alloiococcus otitidis
MLEEMQAYLDDIPKIIDQINQDFYPQIEEIESSFDQLINEGFVFNGPPIPQEVESVEDRIQELDQLIGGLQLAQAKELAETISLDIDQIYERMEVEISAKNESDQLIPSVQKALYYLREEVRVLFFEIDRVSQSYVLIHNEADQIRELRDSVEFLEGKFDKIVDNLDNNFTAYSEALKNLNFIKSELISLNDVKNAVTDQLYGYRDEEVQLKDQLNKMERKAKGLRRRILRENLPGVPASYSEYYTYVMKLLAKLV

SEQ ID NO: 5097 - DNA, 825 bp, Alloiococcus otitidis; identical to SEQ ID NO: 5095
  CDS (40)..(822)

SEQ ID NO: 5098 - protein, 261 aa, Alloiococcus otitidis
MHLHDMLEEMQAYLDDIPKIIDQINQDFYPQIEEIESSFDQLINEGFVFNGPPIPQEVESVEDRIQELDQLIGGLQLAQAKELAETISLDIDQIYERMEVEISAKNESDQLIPSVQKALYYLREEVRVLFFEIDRVSQSYVLIHNEADQIRELRDSVEFLEGKFDKIVDNLDNNFTAYSEALKNLNFIKSELISLNDVKNAVTDQLYGYRDEEVQLKDQLNKMERKAKGLRRRILRENLPGVPASYSEYYTYVMKLLAKLV

SEQ ID NO: 5099 - DNA, 825 bp, Alloiococcus otitidis; identical to SEQ ID NO: 5095
  CDS (16)..(822)

SEQ ID NO: 5100 - protein, 269 aa, Alloiococcus otitidis
MKTGRSVILHLHDMLEEMQAYLDDIPKIIDQINQDFYPQIEEIESSFDQLINEGFVFNGPPIPQEVESVEDRIQELDQLIGGLQLAQAKELAETISLDIDQIYERMEVEISAKNESDQLIPSVQKALYYLREEVRVLFFEIDRVSQSYVLIHNEADQIRELRDSVEFLEGKFDKIVDNLDNNFTAYSEALKNLNFIKSELISLNDVKNAVTDQLYGYRDEEVQLKDQLNKMERKAKGLRRRILRENLPGVPASYSEYYTYVMKLLAKLV

SEQ ID NO: 5101 - DNA, 825 bp, Alloiococcus otitidis; identical to SEQ ID NO: 5095
  CDS (10)..(822)

SEQ ID NO: 5102 - protein, 271 aa, Alloiococcus otitidis
MTMKTGRSVILHLHDMLEEMQAYLDDIPKIIDQINQDFYPQIEEIESSFDQLINEGFVFNGPPIPQEVESVEDRIQELDQLIGGLQLAQAKELAETISLDIDQIYERMEVEISAKNESDQLIPSVQKALYYLREEVRVLFFEIDRVSQSYVLIHNEADQIRELRDSVEFLEGKFDKIVDNLDNNFTAYSEALKNLNFIKSELISLNDVKNAVTDQLYGYRDEEVQLKDQLNKMERKAKGLRRRILRENLPGVPASYSEYYTYVMKLLAKLV

SEQ ID NO: 5103 - DNA, 669 bp, Alloiococcus otitidis
  CDS (19)..(666)
cttgaacggaggaaaaacatgcctatcgaactcactatcattttagtgcttttggttatcctagtggcctttattggtttttttattttaaagcgacaaaattataataacattgtggaattaaaagaccgacaaaaggctctcatggaaggcttgcccacccagcgtttagagaaggtccgtcaaatggacatcagtggccggtctcaagactatgccgatagcttggaagacatgtgggaagacattttggctggaaggaatattacggttgagaaccatctcttccaagccgagcagatgaatgaacgctaccactttaagcagaccaaggaccagcaagatttagcccaccaggaactagaagctatcgagggggacatggtgaaattatctgactccttagaagagcttatcaatcgagaagaagccaatgcccaccgaataaatgagattgaaaagtcttatgaaggagtccggaaaaacttacttgaaaattccttgtggtatggccaagctgttgacgccttggaggataagttagcggatatggaagaagaattcaagcattttgacaaggtaaccagttggggtgaccatgaagacgggtcggtccgttatcttgcacctccacgacatgttggaagagatgcaggcctacctggatga

SEQ ID NO: 5104 - protein, 216 aa, Alloiococcus otitidis
MPIELTIILVLLVILVAFIGFFILKRQNYNNIVELKDRQKALMEGLPTQRLEKVRQMDISGRSQDYADSLEDMWEDILAGRNITVENHLFQAEQMNERYHFKQTKDQQDLAHQELEAIEGDMVKLSDSLEELINREEANAHRINEIEKSYEGVRKNLLENSLWYGQAVDALEDKLADMEEEFKHFDKVTSWGDHEDGSVRYLAPPRHVGRDAGLPG

SEQ ID NO: 5105 - DNA, 477 bp, Alloiococcus otitidis
  CDS (25)..(474)
tctgcccagaaagttggtgaaaaagtgtctgatccaaaatctatcttaaaaaaactccaggaccttatccggggtgaaagtgactttgtctccattctcagtaataccagtgcccttttataccaggacttgcccaatgttaactggttaggtttctatctttggcaggaagacgagcaagaactcctagtcggacccttccagggcaaggtagcttgctaccgaataaaaaccaagcagggtgtctgcggcacggcctttagtcggaaaaccagcatccgggtggcaaatgtccaccaatttccgggccatattgcctgtgacccagattctaagtcagaattagtggtccccttaacgcggaagggtgaagtcatcggggttatcgatattgactcggcccaagtcaaccgctttagccaggaagaccaagaattagtggaagcttgtgccaaaattttggacccctacttgtaa

SEQ ID NO: 5106 - protein, 150 aa, Alloiococcus otitidis
MSDPKSILKKLQDLIRGESDFVSILSNTSALLYQDLPNVNWLGFYLWQEDEQELLVGPFQGKVACYRIKTKQGVCGTAFSRKTSIRVANVHQFPGHIACDPDSKSELVVPLTRKGEVIGVIDIDSAQVNRFSQEDQELVEACAKILDPYL

SEQ ID NO: 5107 - DNA, 654 bp, Alloiococcus otitidis
  CDS (235)..(651)
cttccatactcttattttactccaaaacattttattggaggaattagcatgtcaagatatacaggaccttcctggaagaaatcccgtcgtttgggaatttccctttcaggaaccggaaaagaattagcaagaagaccttacgcaccaggtcaacacggcccaactagccgtaacaagttgtcagaatacggcttacaattgaaagaaaaacaaaaattacgttatctctatggaatgaacgaacgacaattcttgaacttgttcaataagtcaggcaaaatccgtgaaggtaaacagggtaccaattttatgatcttgcttgagcgacgtttagacaacatcgtctaccgtctaggtcttgcttcaactcggcgccaagcccgccaattggtcgtccacggccacattacagttgacggcaaacgggtagatatcccgtcttactcagttgaagttggtcaagtcattggcgttaaagaaagttcaaaagacctttccgttattaccgaatcagttgaatctctttacggtagaccggactttttgactttcgatgaagataagttagaaggtagcttgacccggttgccattacgtgaagaaatgccacaagaaattgaagaatccttggttgttgagttctacaaccgttaa

SEQ ID NO: 5108 - protein, 139 aa, Alloiococcus otitidis
MNERQFLNLFNKSGKIREGKQGTNFMILLERRLDNIVYRLGLASTRRQARQLVVHGHITVDGKRVDIPSYSVEVGQVIGVKESSKDLSVITESVESLYGRPDFLTFDEDKLEGSLTRLPLREEMPQEIEESLVVEFYNR

SEQ ID NO: 5109 - DNA, 654 bp, Alloiococcus otitidis; identical to SEQ ID NO: 5107
  CDS (49)..(651)

SEQ ID NO: 5110 - protein, 201 aa, Alloiococcus otitidis
MSRYTGPSWKKSRRLGISLSGTGKELARRPYAPGQHGPTSRNKLSEYGLQLKEKQKLRYLYGMNERQFLNLFNKSGKIREGKQGTNFMILLERRLDNIVYRLGLASTRRQARQLVVHGHITVDGKRVDIPSYSVEVGQVIGVKESSKDLSVITESVESLYGRPDFLTFDEDKLEGSLTRLPLREEMPQEIEESLVVEFYNR

SEQ ID NO: 5111 - DNA, 642 bp, Alloiococcus otitidis
  CDS (13)..(639)
agaggtgaaaacatggaattatttaagcaagagatgtttgatatttttcaggttcaaggattggatgaccggatggaccagatacggtctcagatccaacccatcttccaaggcctacaaggggaatttcaagactatattaataactctactggacgtaacctgggctttcatattgcccaacacttaagacgtactgttaaccccccagaagcgacttggtgtgcctttggtggcaataaccgaggctataagaaatacccccaccttcaagttcaaatcaacgctgaccatatttttatcggtctagctttgatcgacaacccaaaatatagaaaagaaattggccaggaatttcaagctaatccgaatcactggcagaatttaagcggagacttttatatctcccaagaccacacgaaaacagaccttcttgacctcaatcaagacaatatggaggagactgtggaccgcttggttaacgttaaaaaaggagaaatcatgcttgggagaatcattagaccagacagtcccttgttagaagatgaccaaggtcaagaagattacattaaggaaactttcgacaagattttacccctatacaagcaaagtctagactgttattttaaattagaccggtaa

SEQ ID NO: 5112 - protein, 209 aa, Alloiococcus otitidis
MELFKQEMFDIFQVQGLDDRMDQIRSQIQPIFQGLQGEFQDYINNSTGRNLGFHIAQHLRRTVNPPEATWCAFGGNNRGYKKYPHLQVQINADHIFIGLALIDNPKYRKEIGQEFQANPNHWQNLSGDFYISQDHTKTDLLDLNQDNMEETVDRLVNVKKGEIMLGRIIRPDSPLLEDDQGQEDYIKETFDKILPLYKQSLDCYFKLDR

SEQ ID NO: 5113 - DNA, 1143 bp, Alloiococcus otitidis
  CDS (34)..(1140)
ttccgtagttttattttaaggaggaaatattttatgataattggtgtacctaaggaaattaagaatctagaaaatcgtgttgccttaacaccagataacgttaaggttttagtagatgatggtcacactgtcttggtccaaagccaggctggtgtaggttcaaactttaatgaccaggcctatgaagaagctggggcaaaaattgaaaccagcccagctgatgtctggaaagcccaaatggtcgtcaaggttaaagagcctcaagaagaagaatacgactacttctacgatggcctcatcctatttacctaccttcacctagctaatgaagaaaaattaaccaaagttttagcggacaaaggtgtcactgctattgcttatgaaaccatggttaaaaacggcaaactccctctcctgaccccaatgagtgaggttgcaggtaagatggcggttcaagccgggaccaaattcctggaaaaaatcaacggtgggaaaggggtccttatcggtgctgttccaactgttaaacggtcaaaagttgggattatcggtgggggtgtcgttggtgaaaatgctgctaaagttgcccatgggatgggggctagcgtgaccatcttagacttaaaccctgaacgcttgtcggaactagacaacatctttaacggtcaagtcgaaacccttatctctaacccaactactattgccaacaccgttaaagaatcagaccttattattaccggggtccttgtcccaggtgctaaagcgccagtcctcataaccgaagaaatggttaaatcaatggatgaagggtcagttatcgtggacattgcgattgaccaaggtggaaatgtggaaacttcaactcaccctaccctacacagtgacccagtttacatcaaacatggggtcatccactacgctgttgctaacatccctggtgccgttcctcgaacttctaccattgccctaaccaactctaccctgcaatatgcccgtcacttggctaatgacggaatccaagcggctaaagaagatcaaaccatttatactggtgtcaatgtctatcaaggtaaagtaacaaacgaggctgtggcccatgcctttgatttggaatacactgaattaaaccgattgctcgattaa

SEQ ID NO: 5114 - protein, 369 aa, Alloiococcus otitidis
MIIGVPKEIKNLENRVALTPDNVKVLVDDGHTVLVQSQAGVGSNFNDQAYEEAGAKIETSPADVWKAQMVVKVKEPQEEEYDYFYDGLILFTYLHLANEEKLTKVLADKGVTAIAYETMVKNGKLPLLTPMSEVAGKMAVQAGTKFLEKINGGKGVLIGAVPTVKRSKVGIIGGGVVGENAAKVAHGMGASVTILDLNPERLSELDNIFNGQVETLISNPTTIANTVKESDLIITGVLVPGAKAPVLITEEMVKSMDEGSVIVDIAIDQGGNVETSTHPTLHSDPVYIKHGVIHYAVANIPGAVPRTSTIALTNSTLQYARHLANDGIQAAKEDQTIYTGVNVYQGKVTNEAVAHAFDLEYTELNRLLD

SEQ ID NO: 5115 - DNA, 1062 bp, Alloiococcus otitidis
  CDS (10)..(1059)
gaggatattatgaaaaaattaatttacctatcattattatcaagtttaaccctagctgcctgccaaaatgaccaggaagctccagaaccggaccaagaggatagtagccaagtagaagacagccaagaagagatgaaccaagacaaagatggccaggctgaagatccaggggaagaccaagaaaatgaagaaagtgaaggcggtcaagatgaaggagaccaggcccaattggaagtgactgaccccctaggccaccaagtcagtttgccatctgatccagaacggctagctgtctttgacaacggccagttagacatcctccaggacctgggtttagctgaccgggttgtcgcaaccgcaaccgataatttgcctgaccacctgcaagagtttgctgacttaccggtggctgggaccttgcatgaaattgacttggagatcgccaatgccgaagaacccgacttagctattgtcgctagacggtctagtgataactatgatgcggttagtcaagtggccccgaccttggatatgtcagatgctgacggtgacttgtgggcttctattcaagaaaaccttagtttatacggggaaatttttaacctagaggatgaagcaagtgcaattgaaagtgacttggaagcctccctgtctgacctacaagagcaaaatgaagcctctgatttatccaccctggtcttgatgaccaacgaaggagccttgtcagcttttggtagtggttcacgctacagctttgttcatgatttgtttggctttgaaccagttgacactggaattgaagcttcccgtcacgggatggacgtctcttatgaatacgtggttgaccaaaacccggatttgatttttgttattgaccggacagcagctatcgggggcgaccaagaggctggtgaattttccgacaacccactgatacaagaaacagacgcctaccaaaatgacaatattgtctacttgacaccagacgtttggtatctcagtgaaggtgggacccaggccttagcccaaatgatagaagaagtttcagttgtctttgactag

SEQ ID NO: 5116 - protein, 350 aa, Alloiococcus otitidis
MKKLIYLSLLSSLTLAACQNDQEAPEPDQEDSSQVEDSQEEMNQDKDGQAEDPGEDQENEESEGGQDEGDQAQLEVTDPLGHQVSLPSDPERLAVFDNGQLDILQDLGLADRVVATATDNLPDHLQEFADLPVAGTLHEIDLEIANAEEPDLAIVARRSSDNYDAVSQVAPTLDMSDADGDLWASIQENLSLYGEIFNLEDEASAIESDLEASLSDLQEQNEASDLSTLVLMTNEGALSAFGSGSRYSFVHDLFGFEPVDTGIEASRHGMDVSYEYVVDQNPDLIFVIDRTAAIGGDQEAGEFSDNPLIQETDAYQNDNIVYLTPDVWYLSEGGTQALAQMIEEVSVVFD

SEQ ID NO: 5117 - DNA, 777 bp, Alloiococcus otitidis
  CDS (19)..(774)
agaaaggaagcaagtatcatgatggatttgaaccatgtcagcaaaacttttggtgaaaaaactgtcgtatcggatgtaacccttcccattgaaaaaggaaaaatgaccgcctgtattggtccaaatggggccggcaagagtactcttttagagattatcagccgactcattcctagagattcgggttccgttatcatagacgggtctgaggtcaattcctttaagcaaaatgacctagctaaacgtttggctttcttgaagcaaaccaataacatgaatgtccgcctaaccgtcagcgaacttgtttgttttggtcgatttccttataccaagggtcggttaaatgccaactgctgggataaggtcaataaggccttgacctacctaaacttaaaagaattaaaagaccaatatattgataccttgtctggtggtcagttgcaacgggccttgattgccatggtcttgtgccaggatacagactatatcttactggacgaacccttgaataacttggatatgacccacggtgttgccatgatgaagaccttacggaagttagtcgatgacctaggtaagactattatcacagttatccacgacgttaactttgcggctacttatgccgacaatattattgccatgaaagacggccaactcttcaagtccggccccactgaccaggtcttgaccaaggaaaacttggaccaactctttaacatggatattgaaatcatcgaaagaaacaataaaaaagtcattctttactatgactag

SEQ ID NO: 5118 - protein, 252 aa, Alloiococcus otitidis
MMDLNHVSKTFGEKTVVSDVTLPIEKGKMTACIGPNGAGKSTLLEIISRLIPRDSGSVIIDGSEVNSFKQNDLAKRLAFLKQTNNMNVRLTVSELVCFGRFPYTKGRLNANCWDKVNKALTYLNLKELKDQYIDTLSGGQLQRALIAMVLCQDTDYILLDEPLNNLDMTHGVAMMKTLRKLVDDLGKTIITVIHDVNFAATYADNIIAMKDGQLFKSGPTDQVLTKENLDQLFNMDIEIIERNNKKVILYYD

SEQ ID NO: 5119 - DNA, 978 bp, Alloiococcus otitidis
  CDS (424)..(975)
ggggtgagcgtaagcttgcaaaataagaagccatacctgcacttggtctggttaggcttgtcagtccttattttaactgtcctttacttgttctacaatacccggggcaacctggccttcgccttaaatttaagggtcagccgcttacctgtctttgccttggtaggtcttgccacggcggtagcgaccgtagttttccagaccatagcaaaaaataatatcttaagtcccaatatcatcggactagatagcctgtatagtttgttccaaaccctgatcatcttcttttttgggtcaggtcacttgctaggccggtctagccagctgaattttatcatcagtactgtcttgatggtggtagcctcattcggcttgttctacatctttttcaaactttacccaggccggattttcctcctcctgatgaccggtttgatttttgggaccttgatgcgtaacttaattgtcttcttccaagccttgattgaccccaatgaattccagactattctttcccggaccttggttagctttaacacggtcgattcttcactgatctggctcagcctggtcattgtagctccaattgtgatttacttattttttcactcccataccttggatgtcttgcatttgggggatgtctatgccaagggtttaggtgtctatgtcgaccgggaatatttttacttatttatcttggtcagtattttaacggctgtttccacagccttagtgggtcccatcactttccttggctttttaggagctaacttggcctaccgaatcatgccttcctaccatcacacctggctgtttttaaccgcatctttcattactgttcttttgttgcttgccagccagtttatagtggaacacctcttgcctgttcgcacctcgattggtgttgtgattgaactgatcggtggcatctatttcttataccttattattaaagaaaggaagcaagtatcatga

SEQ ID NO: 5120 - protein, 184 aa, Alloiococcus otitidis
MTGLIFGTLMRNLIVFFQALIDPNEFQTILSRTLVSFNTVDSSLIWLSLVIVAPIVIYLFFHSHTLDVLHLGDVYAKGLGVYVDREYFYLFILVSILTAVSTALVGPITFLGFLGANLAYRIMPSYHHTWLFLTASFITVLLLLASQFIVEHLLPVRTSIGVVIELIGGIYFLYLIIKERKQVS

SEQ ID NO: 5121 - DNA, 978 bp, Alloiococcus otitidis; identical to SEQ ID NO: 5119
  CDS (352)..(975)

SEQ ID NO: 5122 - protein, 208 aa, Alloiococcus otitidis
MVVASFGLFYIFFKLYPGRIFLLLMTGLIFGTLMRNLIVFFQALIDPNEFQTILSRTLVSFNTVDSSLIWLSLVIVAPIVIYLFFHSHTLDVLHLGDVYAKGLGVYVDREYFYLFILVSILTAVSTALVGPITFLGFLGANLAYRIMPSYHHTWLFLTASFITVLLLLASQFIVEHLLPVRTSIGVVIELIGGIYFLYLIIKERKQVS

SEQ ID NO: 5123 - DNA, 978 bp, Alloiococcus otitidis; identical to SEQ ID NO: 5119
  CDS (88)..(975)

SEQ ID NO: 5124 - protein, 296 aa, Alloiococcus otitidis
MFYNTRGNLAFALNLRVSRLPVFALVGLATAVATVVFQTIAKNNILSPNIIGLDSLYSLFQTLIIFFFGSGHLLGRSSQLNFIISTVLMVVASFGLFYIFFKLYPGRIFLLLMTGLIFGTLMRNLIVFFQALIDPNEFQTILSRTLVSFNTVDSSLIWLSLVIVAPIVIYLFFHSHTLDVLHLGDVYAKGLGVYVDREYFYLFILVSILTAVSTALVGPITFLGFLGANLAYRIMPSYHHTWLFLTASFITVLLLLASQFIVEHLLPVRTSIGVVIELIGGIYFLYLIIKERKQVS

SEQ ID NO: 5125 - DNA, 978 bp, Alloiococcus otitidis; identical to SEQ ID NO: 5119
  CDS (16)..(975)

SEQ ID NO: 5126 - protein, 320 aa, Alloiococcus otitidis
MQNKKPYLHLVWLGLSVLILTVLYLFYNTRGNLAFALNLRVSRLPVFALVGLATAVATVVFQTIAKNNILSPNIIGLDSLYSLFQTLIIFFFGSGHLLGRSSQLNFIISTVLMVVASFGLFYIFFKLYPGRIFLLLMTGLIFGTLMRNLIVFFQALIDPNEFQTILSRTLVSFNTVDSSLIWLSLVIVAPIVIYLFFHSHTLDVLHLGDVYAKGLGVYVDREYFYLFILVSILTAVSTALVGPITFLGFLGANLAYRIMPSYHHTWLFLTASFITVLLLLASQFIVEHLLPVRTSIGVVIELIGGIYFLYLIIKERKQVS

SEQ ID NO: 5127 - DNA, 978 bp, Alloiococcus otitidis; identical to SEQ ID NO: 5119
  CDS (4)..(975)

SEQ ID NO: 5128 - protein, 324 aa, Alloiococcus otitidis
MSVSLQNKKPYLHLVWLGLSVLILTVLYLFYNTRGNLAFALNLRVSRLPVFALVGLATAVATVVFQTIAKNNILSPNIIGLDSLYSLFQTLIIFFFGSGHLLGRSSQLNFIISTVLMVVASFGLFYIFFKLYPGRIFLLLMTGLIFGTLMRNLIVFFQALIDPNEFQTILSRTLVSFNTVDSSLIWLSLVIVAPIVIYLFFHSHTLDVLHLGDVYAKGLGVYVDREYFYLFILVSILTAVSTALVGPITFLGFLGANLAYRIMPSYHHTWLFLTASFITVLLLLASQFIVEHLLPVRTSIGVVIELIGGIYFLYLIIKERKQVS

SEQ ID NO: 5129 - DNA, 999 bp, Alloiococcus otitidis
  CDS (394)..(996)
aagaaaggaagactggtgttggatgaaagaagaaagcccagctacctgccgcttattgggattgccctagtcttggtcctatcttttgtttccttatttgttggggtccatgacttaggcgtcaaccatttactgtctttagatgacttgcaggtaaaagtccttttaacgacccggctgcctcggaccattagcttggttttagcaggggctagcttgtcagtggcaggattattgatgcaaaagttaacccagaataagtttgtctcacccacaacagctgggactatggcatcggcccggtttggagccattttatccatggtgatttttgctggagctacatacttccagcgcatcctctttgcctttgtttgtgccagtttagggaccttgatctttcttctcttcttgcgaacggtcaagcggaataagtcgatgatggtgcccttggtcgggatgatgtttggcaatatcgtcagctctgttggttcctacatagccttgcgttatgacctcgttcaaaatgccaactcctggtttcaaggaaatttttccctggtgacttcagataattaccaattaatcttcctagctcttccggtttttattttgatttacttgtttgctcattactttacagtaatggctttgggccaggaaatggccaccgagttaggggtgtcctaccgagtgattgaactggttgggatcttgttagttgcccttgggaccactgcagtccttttgactgttgggtccatcccctttattggcattattgtgcccaacctgatctcattgaaaggaggggataacttccagaaaatgctcctaccaacggcaatttttgggtcagtttttaccatcgtttgtgatatcttagcaaggatagtcatagccccatatgaactgccaatttctgtcgtggttggagtctcgggaagcatcctatttttattcttacttttgaggggtgagcgtaagcttgcaaaataa

SEQ ID NO: 5130 - protein, 201 aa, Alloiococcus otitidis
MIFLLFLRTVKRNKSMMVPLVGMMFGNIVSSVGSYIALRYDLVQNANSWFQGNFSLVTSDNYQLIFLALPVFILIYLFAHYFTVMALGQEMATELGVSYRVIELVGILLVALGTTAVLLTVGSIPFIGIIVPNLISLKGGDNFQKMLLPTAIFGSVFTIVCDILARIVIAPYELPISVVVGVSGSILFLFLLLRGERKLAK

SEQ ID NO: 5131 - DNA, 999 bp, Alloiococcus otitidis; identical to SEQ ID NO: 5129
  CDS (322)..(996)

SEQ ID NO: 5132 - protein, 225 aa, Alloiococcus otitidis
MVIFAGATYFQRILFAFVCASLGTLIFLLFLRTVKRNKSMMVPLVGMMFGNIVSSVGSYIALRYDLVQNANSWFQGNFSLVTSDNYQLIFLALPVFILIYLFAHYFTVMALGQEMATELGVSYRVIELVGILLVALGTTAVLLTVGSIPFIGIIVPNLISLKGGDNFQKMLLPTAIFGSVFTIVCDILARIVIAPYELPISVVVGVSGSILFLFLLLRGERKLAK

SEQ ID NO: 5133 - DNA, 999 bp, Alloiococcus otitidis; identical to SEQ ID NO: 5129
  CDS (238)..(996)

SEQ ID NO: 5134 - protein, 253 aa, Alloiococcus otitidis
MQKLTQNKFVSPTTAGTMASARFGAILSMVIFAGATYFQRILFAFVCASLGTLIFLLFLRTVKRNKSMMVPLVGMMFGNIVSSVGSYIALRYDLVQNANSWFQGNFSLVTSDNYQLIFLALPVFILIYLFAHYFTVMALGQEMATELGVSYRVIELVGILLVALGTTAVLLTVGSIPFIGIIVPNLISLKGGDNFQKMLLPTAIFGSVFTIVCDILARIVIAPYELPISVVVGVSGSILFLFLLLRGERKLAK

SEQ ID NO: 5135 - DNA, 999 bp, Alloiococcus otitidis; identical to SEQ ID NO: 5129
  CDS (235)..(996)

SEQ ID NO: 5136 - protein, 254 aa, Alloiococcus otitidis
MMQKLTQNKFVSPTTAGTMASARFGAILSMVIFAGATYFQRILFAFVCASLGTLIFLLFLRTVKRNKSMMVPLVGMMFGNIVSSVGSYIALRYDLVQNANSWFQGNFSLVTSDNYQLIFLALPVFILIYLFAHYFTVMALGQEMATELGVSYRVIELVGILLVALGTTAVLLTVGSIPFIGIIVPNLISLKGGDNFQKMLLPTAIFGSVFTIVCDILARIVIAPYELPISVVVGVSGSILFLFLLLRGERKLAK

SEQ ID NO: 5137 - DNA, 999 bp, Alloiococcus otitidis; identical to SEQ ID NO: 5129
  CDS (148)..(996)

SEQ ID NO: 5138 - protein, 283 aa, Alloiococcus otitidis
MQVKVLLTTRLPRTISLVLAGASLSVAGLLMQKLTQNKFVSPTTAGTMASARFGAILSMVIFAGATYFQRILFAFVCASLGTLIFLLFLRTVKRNKSMMVPLVGMMFGNIVSSVGSYIALRYDLVQNANSWFQGNFSLVTSDNYQLIFLALPVFILIYLFAHYFTVMALGQEMATELGVSYRVIELVGILLVALGTTAVLLTVGSIPFIGIIVPNLISLKGGDNFQKMLLPTAIFGSVFTIVCDILARIVIAPYELPISVVVGVSGSILFLFLLLRGERKLAK

SEQ ID NO: 5139 - DNA, 999 bp, Alloiococcus otitidis; identical to SEQ ID NO: 5129
  CDS (19)..(996)

SEQ ID NO: 5140 - protein, 326 aa, Alloiococcus otitidis
MDERRKPSYLPLIGIALVLVLSFVSLFVGVHDLGVNHLLSLDDLQVKVLLTTRLPRTISLVLAGASLSVAGLLMQKLTQNKFVSPTTAGTMASARFGAILSMVIFAGATYFQRILFAFVCASLGTLIFLLFLRTVKRNKSMMVPLVGMMFGNIVSSVGSYIALRYDLVQNANSWFQGNFSLVTSDNYQLIFLALPVFILIYLFAHYFTVMALGQEMATELGVSYRVIELVGILLVALGTTAVLLTVGSIPFIGIIVPNLISLKGGDNFQKMLLPTAIFGSVFTIVCDILARIVIAPYELPISVVVGVSGSILFLFLLLRGERKLAK

SEQ ID NO: 5141 - DNA, 999 bp, Alloiococcus otitidis; identical to SEQ ID NO: 5129
  CDS (16)..(996)

SEQ ID NO: 5142 - protein, 327 aa, Alloiococcus otitidis
MLDERRKPSYLPLIGIALVLVLSFVSLFVGVHDLGVNHLLSLDDLQVKVLLTTRLPRTISLVLAGASLSVAGLLMQKLTQNKFVSPTTAGTMASARFGAILSMVIFAGATYFQRILFAFVCASLGTLIFLLFLRTVKRNKSMMVPLVGMMFGNIVSSVGSYIALRYDLVQNANSWFQGNFSLVTSDNYQLIFLALPVFILIYLFAHYFTVMALGQEMATELGVSYRVIELVGILLVALGTTAVLLTVGSIPFIGIIVPNLISLKGGDNFQKMLLPTAIFGSVFTIVCDILARIVIAPYELPISVVVGVSGSILFLFLLLRGERKLAK

SEQ ID NO: 5143 - DNA, 1365 bp, Alloiococcus otitidis
  CDS (16)..(1362)
aaaaggagcatgtgtatggaatcaagcaaagaatatatccaacaagtgattgataaagttaaggccaagcacccggaaaaagaagaatttaaccaggctgtgacagacgttttaacctccttggaaaaatacttagaccaacatccggaagtccaagaccataaccttttggagcttttggttgagccagagcgggtcattaagttccgtgtaccttggcaagatgaccaaggcaattggcgggtcaatgaaggacttcgtgtccagtttaattccgctatcggtccctacaagggagggctacgctttgatcccagcgtgaatgaaagtgttatccggtttttagcctttgaacagatctttaaaaatagcttaactaatcttccgattggaggaggtaagggtgggtctgactttaaccccaaaggcaagtctgataatgagatcatgcgcttttgccaaagctttgtaactgaactacaaaaatatattggtcctgattatgatgtgcctgctggagacgtaggggttagcaagcgagagatatcttatatgtacggtcagtacaaacggttaagagagattacacctggggtttacactggtaagcctttgacctttggtgggagtgtcggccggactgaagcgactgggtatggcctggtttattttgtggatgacctcttaaaagatcgcggagactcactagagggcaagcggattgtggtttcggggtcaggcaatgtggctggccatgcgatcaaaaaagcccaagattttggcggcttagtcctagcttgttctgaccgaggtggctacttgtatgaccctgatgggattgacgttgaccaagtcattgctattaaaagtaaccctaacaataccctagcagagtataaaagaaaaggggggcaagccaagtacgtccaaggggaatcagtatgggatttggatatcaattatgatattgcccttccttgtgcaacccaaaacgaaatttcaaagtctcaagctaaaaatattgcaagatctggcgtctttttacttgcagaaggggccaatatgccggtggttaaagacggcctggaggtcttgcttgatcatgacatcattgtttgccccggcaaggcagccaatgctggtggggtagctgtgtcagccttagagatgtcccaaaactcccagcgcctgtcttggacctttgaccaggttgaccaaaacttgcaagtcattatgcaggatatttaccaggcttgtagccaggccgccaaagattatggggatgacaagaaccttatcttgggagccaatattgctggtgctgacaaggtcttccaagccatgttagcccaaggattggtctag

SEQ ID NO: 5144 - protein, 449 aa, Alloiococcus otitidis
MESSKEYIQQVIDKVKAKHPEKEEFNQAVTDVLTSLEKYLDQHPEVQDHNLLELLVEPERVIKFRVPWQDDQGNWRVNEGLRVQFNSAIGPYKGGLRFDPSVNESVIRFLAFEQIFKNSLTNLPIGGGKGGSDFNPKGKSDNEIMRFCQSFVTELQKYIGPDYDVPAGDVGVSKREISYMYGQYKRLREITPGVYTGKPLTFGGSVGRTEATGYGLVYFVDDLLKDRGDSLEGKRIVVSGSGNVAGHAIKKAQDFGGLVLACSDRGGYLYDPDGIDVDQVIAIKSNPNNTLAEYKRKGGQAKYVQGESVWDLDINYDIALPCATQNEISKSQAKNIARSGVFLLAEGANMPVVKDGLEVLLDHDIIVCPGKAANAGGVAVSALEMSQNSQRLSWTFDQVDQNLQVIMQDIYQACSQAAKDYGDDKNLILGANIAGADKVFQAMLAQGLV

SEQ ID NO: 5145 - DNA, 1365 bp, Alloiococcus otitidis; identical to SEQ ID NO: 5143
  CDS (10)..(1362)

SEQ ID NO: 5146 - protein, 451 aa, Alloiococcus otitidis
MCMESSKEYIQQVIDKVKAKHPEKEEFNQAVTDVLTSLEKYLDQHPEVQDHNLLELLVEPERVIKFRVPWQDDQGNWRVNEGLRVQFNSAIGPYKGGLRFDPSVNESVIRFLAFEQIFKNSLTNLPIGGGKGGSDFNPKGKSDNEIMRFCQSFVTELQKYIGPDYDVPAGDVGVSKREISYMYGQYKRLREITPGVYTGKPLTFGGSVGRTEATGYGLVYFVDDLLKDRGDSLEGKRIVVSGSGNVAGHAIKKAQDFGGLVLACSDRGGYLYDPDGIDVDQVIAIKSNPNNTLAEYKRKGGQAKYVQGESVWDLDINYDIALPCATQNEISKSQAKNIARSGVFLLAEGANMPVVKDGLEVLLDHDIIVCPGKAANAGGVAVSALEMSQNSQRLSWTFDQVDQNLQVIMQDIYQACSQAAKDYGDDKNLILGANIAGADKVFQAMLAQGLV

SEQ ID NO: 5147 - DNA, 825 bp, Alloiococcus otitidis
  CDS (139)..(822)
gcgggaccgttaccgaaaagtggaacaccggctaaacttagccattatcgcggtttccttagctttggtcattgttttattgttcacattctttatttaggaaggggaagtcaagtgaaaatagggcttatcgctgctatggaccaggaagctaggttattaattgaagcaataaaagacctgaccaagataaatttaggtcacttagacttttaccaaggcttgctagggtcaagcccagttgttttagtccaatccggtattggcaaggtgaatgcggctatcgccacttctatattgatcagtcactttcaggcagactttattatcaacaccggttcagctggagggattggctcaaacctttccatcggggacctggtaatttcagaccaagtggcctactatgatgtggacaaccgggtatttgattacgcttatggccagctgcctcaaatgccagccgtttatgaagtcaaaccggaattttccaagctggctcaagacctgggccaaaaattaggctggcacacccggtcaggcttggtggtgacaggggattcatttgtggctagtaaggaccaggttaagcaagttaaaagccacttccccaaggccttagtgactgaaatggaaggggcggctgtggcccaaacctgttacaattttgatgttgactacctcattatccgctgcttatccgatacggctgatgaagaggctagccttgattttgaggaatttattgaccaagctggtaaggcctcagcaaggctggttattgagctagcggaagccttggcgaagcatgaagatactaagtaa

SEQ ID NO: 5148 - protein, 228 aa, Alloiococcus otitidis
MDQEARLLIEAIKDLTKINLGHLDFYQGLLGSSPVVLVQSGIGKVNAAIATSILISHFQADFIINTGSAGGIGSNLSIGDLVISDQVAYYDVDNRVFDYAYGQLPQMPAVYEVKPEFSKLAQDLGQKLGWHTRSGLVVTGDSFVASKDQVKQVKSHFPKALVTEMEGAAVAQTCYNFDVDYLIIRCLSDTADEEASLDFEEFIDQAGKASARLVIELAEALAKHEDTK

SEQ ID NO: 5149 - DNA, 825 bp, Alloiococcus otitidis; identical to SEQ ID NO: 5147
  CDS (115)..(822)

SEQ ID NO: 5150 - protein, 236 aa, Alloiococcus otitidis
MKIGLIAAMDQEARLLIEAIKDLTKINLGHLDFYQGLLGSSPVVLVQSGIGKVNAAIATSILISHFQADFIINTGSAGGIGSNLSIGDLVISDQVAYYDVDNRVFDYAYGQLPQMPAVYEVKPEFSKLAQDLGQKLGWHTRSGLVVTGDSFVASKDQVKQVKSHFPKALVTEMEGAAVAQTCYNFDVDYLIIRCLSDTADEEASLDFEEFIDQAGKASARLVIELAEALAKHEDTK

SEQ ID NO: 5151 - DNA, 453 bp, Alloiococcus otitidis
  CDS (88)..(450)
ggaccgatagcggaattaaactggacacgaagtccttcattgacccgccaattgccttggtcatcttgccaaggtacacggaacttaatgacccgctctggctcaaccaaaagctccaaaaggttatggtcttggacttccggatgttggtctaagtatttttccaaggaggttaaaacgtctgtcacagcctggttaaattcttctttttccgggtgcttggccttaactttatcaatcacttgttggatatattctttgcttgattccatacacatgctccttttctataacttaaactcattttacttagtatcttcatgcttcgccaaggcttccgctagctcaataaccagccttgctgaggccttaccagcttggtcaataaattcctcaaaatcaaggctagcctcttcatcagccgtatcggataagcagcggataatgaggtag

SEQ ID NO: 5152 - protein, 121 aa, Alloiococcus otitidis
MTRSGSTKSSKRLWSWTSGCWSKYFSKEVKTSVTAWLNSSFSGCLALTLSITCWIYSLLDSIHMLLFYNLNSFYLVSSCFAKASASSITSLAEALPAWSINSSKSRLASSSAVSDKQRIMR

SEQ ID NO: 5153 - DNA, 228 bp, Alloiococcus otitidis
  CDS (1)..(225)
atgaaaaatgaaggcagtcaaggtaaaatgaagatcaatctaaaaaaaataaagcaggcttggactgacttccgtgaagagagaaagttagccaagcaaggcaagaccaagaagagccggttaagtgagcgggaccgttaccgaaaagtggaacaccggctaaacttagccattatcgcggtttccttagctttggtcattgttttattgttcacattctttatttag

SEQ ID NO: 5154 - protein, 75 aa, Alloiococcus otitidis
MKNEGSQGKMKINLKKIKQAWTDFREERKLAKQGKTKKSRLSERDRYRKVEHRLNLAIIAVSLALVIVLLFTFFI

SEQ ID NO: 5155 - DNA, 558 bp, Alloiococcus otitidis
  CDS (13)..(555)
gtgagggataaaatggattttgaagaaaaaacaatcaagcgccaaaaaatttacaaggggaatatcaccgaatatgaagtctttacggttgaactccccaacggtcaaaaagccagccgggaaattgtctggcacggtgatgcagcggggattttggcctttgaagatgacaaattgatttgtgtgaaacaataccgcaagcccattgagcaagtctcggttgagcttccttgtggtttaatcgaagagggggagacagctggccaggctgccttacgggagctagaagaagaaacgggctaccgggcttcggacctcagccatgtcactgaattttataactctcctggtttcaccaatgagaagctttacctctatgaaagtgagcatttgacccaagttgaagagccattggatcaggatcctgatgaatttattgaagtggttaaactgtcttatgaccaggcctgggatttggtagaccaaggcttgataaatgattccaagactatttttgccctctactattggcaattaaagttggctaagggtgattag

SEQ ID NO: 5156 - protein, 181 aa, Alloiococcus otitidis
MDFEEKTIKRQKIYKGNITEYEVFTVELPNGQKASREIVWHGDAAGILAFEDDKLICVKQYRKPIEQVSVELPCGLIEEGETAGQAALRELEEETGYRASDLSHVTEFYNSPGFTNEKLYLYESEHLTQVEEPLDQDPDEFIEVVKLSYDQAWDLVDQGLINDSKTIFALYYWQLKLAKGD

SEQ ID NO: 5157 - DNA, 558 bp, Alloiococcus otitidis; identical to SEQ ID NO: 5155
  CDS (1)..(555)

SEQ ID NO: 5158 - protein, 185 aa, Alloiococcus otitidis
MRDKMDFEEKTIKRQKIYKGNITEYEVFTVELPNGQKASREIVWHGDAAGILAFEDDKLICVKQYRKPIEQVSVELPCGLIEEGETAGQAALRELEEETGYRASDLSHVTEFYNSPGFTNEKLYLYESEHLTQVEEPLDQDPDEFIEVVKLSYDQAWDLVDQGLINDSKTIFALYYWQLKLAKGD

SEQ ID NO: 5159 - DNA, 360 bp, Alloiococcus otitidis
  CDS (31)..(357)
tcctgggtgatttcctggcataggtcttcgatggtttccgctgatttggttagaatgtcaaaggttgccttgcttttggcagtgtgtccttcaatcttgacaaacttacgggtcatatcatccaaggaggggaggtggatatacaagaattggtccacttggtggatacgatcgggttctttgacaatatctttaaacaaagacttggtgatctcaattgtattgtggcgtttttcaattgctttcagcttgttcgaagcatttatttgcttttcaatagctaggatatgctttttgctggtctgcatggtttgtctaaaaaacttgatatcatcaggtagcaagcccttagaccggtaa

SEQ ID NO: 5160 - protein, 109 aa, Alloiococcus otitidis
MVSADLVRMSKVALLLAVCPSILTNLRVISSKEGRWIYKNWSTWWIRSGSLTISLNKDLVISIVLWRFSIAFSLFEAFICFSIARICFLLVCMVCLKNLISSGSKPLDR

SEQ ID NO: 5161 - DNA, 360 bp, Alloiococcus otitidis; identical to SEQ ID NO: 5159
  CDS (7)..(357)

SEQ ID NO: 5162 - protein, 117 aa, Alloiococcus otitidis
MISWHRSSMVSADLVRMSKVALLLAVCPSILTNLRVISSKEGRWIYKNWSTWWIRSGSLTISLNKDLVISIVLWRFSIAFSLFEAFICFSIARICFLLVCMVCLKNLISSGSKPLDR

SEQ ID NO: 5163 - DNA, 726 bp, Alloiococcus otitidis
  CDS (292)..(723)
gaatatgcctttcttaggaggatgaccatgacccgagcccagaaattttcaagttattttttaactggactgacctttttacttgtactcggagcggctcttgacgaattcaatagtctcttgtccctcattatagcggttttagctgcaattggagcttattttttactcaaaaatttttttcaaaaggatgaccagtcaccccaggttcccaaattatccaaggataaggaagctttttaccggtctaagggcttgctacctgatgatatcaagttttttagacaaaccatgcagaccagcaaaaagcatatcctagctattgaaaagcaaataaatgcttcgaacaagctgaaagcaattgaaaaacgccacaatacaattgagatcaccaagtctttgtttaaagatattgtcaaagaacccgatcgtatccaccaagtggaccaattcttgtatatccacctcccctccttggatgatatgacccgtaagtttgtcaagattgaaggacacactgccaaaagcaaggcaacctttgacattctaaccaaatcagcggaaaccatcgaagacctatgccaggaaatcacccaggactacttagactttcgccaagctgacctgtcttccatccaagctagtatcgatatcactgaagacagcttagaaaaacatgaccagaccgaacaaaattcgaaaagcatccatgacactgagatctaa

SEQ ID NO: 5164 - protein, 144 aa, Alloiococcus otitidis
MQTSKKHILAIEKQINASNKLKAIEKRHNTIEITKSLFKDIVKEPDRIHQVDQFLYIHLPSLDDMTRKFVKIEGHTAKSKATFDILTKSAETIEDLCQEITQDYLDFRQADLSSIQASIDITEDSLEKHDQTEQNSKSIHDTEI

SEQ ID NO: 5165 - DNA, 726 bp, Alloiococcus otitidis; identical to SEQ ID NO: 5163
  CDS (22)..(723)

SEQ ID NO: 5166 - protein, 234 aa, Alloiococcus otitidis
MTMTRAQKFSSYFLTGLTFLLVLGAALDEFNSLLSLIIAVLAAIGAYFLLKNFFQKDDQSPQVPKLSKDKEAFYRSKGLLPDDIKFFRQTMQTSKKHILAIEKQINASNKLKAIEKRHNTIEITKSLFKDIVKEPDRIHQVDQFLYIHLPSLDDMTRKFVKIEGHTAKSKATFDILTKSAETIEDLCQEITQDYLDFRQADLSSIQASIDITEDSLEKHDQTEQNSKSIHDTEI

SEQ ID NO: 5167 - DNA, 348 bp, Alloiococcus otitidis
  CDS (1)..(345)
atggctaggacttcttgtaaggtatcaattaaatctgtttgggttttttctagggtttcaatatcaaccacggctcgttcattttcccgggcagtgtcaatcgaggattgtttaagcatctctgaatttttcttaagcatttcattggttgtttcagagacttgtcgctggagctgtgattgcctcttgctggcggagcagggtaagggagatgacgacctggtttttccaaagggggatagcagtattagtagaggtttggattttctccgccaaagtttggttggtgttttggatcatccgaatttggggagcctgctggatggtgagttggcgggcaatttttaa

SEQ ID NO: 5168 - protein, 115 aa, Alloiococcus otitidis
MARTSCKVSIKSVWVFSRVSISTTARSFSRAVSIEDCLSISEFFLSISLVVSETCRWSCDCLLLAEQGKGDDDLVFPKGDSSISRGLDFLRQSLVGVLDHPNLGSLLDGELAGNF

SEQ ID NO: 5169 - DNA, 933 bp, Alloiococcus otitidis
  CDS (7)..(930)
aagctcatgaatgaccaaaataataactactttgatgacttattaaacgacccctttgcgagctctgaccaggaagaagagtcacaccaagaatcagaagaaaaatccaccagcctagcccctagccaggaaggccaatcaacctttgaccaattgccggccgaccaccaggccaaggccaaggaattgtctcagaaaatttcagacaaggacatcaactctgtcctcaattatggggctgctgcccagaaaaaaataggcgatttttcccaaaatgtcttagaccatgtccaaaaccaagatactgaccatattggggagattctcaacgacctcatgtaccagctgaaagaagctgaccccaaagaattaaccgcaaaaaattctaatattttcaagcggatcttcaaaaaaattaaccggtccatttatgaaacaacagccaagtaccaaatgatcggggcccaggtggataaaattgctagcaagctagaccaagaaaaagacaaactcttgaaagacaatgagatgctcagcgaactctatgagaaaaacttagacttctatgaagccctcaatgtctatatcgcagctggcgaactcaagatggaccagataagtcaggaccaactgcctgaagccatgaaagaggctgagtcgggcaatgactccatgacggtccagcgggtcaacgacctcaaccaattccaatcccggttagaaaaacgagttcacgacttaaaaattgcccgccaactcaccatccagcaggctccccaaattcggatgatccaaaacaccaaccaaactttggcggagaaaatccaaacctctactaatactgctatccccctttggaaaaaccaggtcgtcatctcccttaccctgctccgccagcaagaggcaatcacagctccagcgacaagtctctga

SEQ ID NO: 5170 - protein, 308 aa, Alloiococcus otitidis
MNDQNNNYFDDLLNDPFASSDQEEESHQESEEKSTSLAPSQEGQSTFDQLPADHQAKAKELSQKISDKDINSVLNYGAAAQKKIGDFSQNVLDHVQNQDTDHIGEILNDLMYQLKEADPKELTAKNSNIFKRIFKKINRSIYETTAKYQMIGAQVDKIASKLDQEKDKLLKDNEMLSELYEKNLDFYEALNVYIAAGELKMDQISQDQLPEAMKEAESGNDSMTVQRVNDLNQFQSRLEKRVHDLKIARQLTIQQAPQIRMIQNTNQTLAEKIQTSTNTAIPLWKNQVVISLTLLRQQEAITAPATSL

SEQ ID NO: 5171 - DNA, 426 bp, Alloiococcus otitidis
  CDS (157)..(423)
tccaaaacaccaaccaaactttggcggagaaaatccaaacctctactaatactgctatccccctttggaaaaaccaggtcgtcatctcccttaccctgctccgccagcaagaggcaatcacagctccagcgacaagtctctgaaacaaccaatgaaatgcttaagaaaaattcagagatgcttaaacaatcctcgattgacactgcccgggaaaatgaacgagccgtggttgatattgaaaccctagaaaaaacccaaacagatttaattgataccttacaagaagtcctagccattcaaaaagaaggccaccaaaaacgcctagatgccgaaaaacgactctacgttatggaagaccagatgaaaaaccaactcctagacctcagtcgggaagataagatcaagcctgatgaccatgaatggtag

SEQ ID NO: 5172 - protein, 89 aa, Alloiococcus otitidis
MLKKNSEMLKQSSIDTARENERAVVDIETLEKTQTDLIDTLQEVLAIQKEGHQKRLDAEKRLYVMEDQMKNQLLDLSREDKIKPDDHEW

SEQ ID NO: 5173 - DNA, 342 bp, Alloiococcus otitidis
  CDS (106)..(339)
atggtagattctaagaccatcttgcttccccctcttaaagggcttaaacttccattgtgcattaaccctagtgagggtataataagacgaggaaggagtgctagaatgattggatttatactttcactgatcattggtggtgtgattggagctttagcccaatacttcacccaaaaagatgtcccaggtggggtgatcggaaatattatcgttggttttcttgggtcttctctaggaggctggctcctaggagatttaggaccaactgttgccgattttgcgcttttaccagcagccatcggagccatcctagttgtcttgatttatgatttaattttctaa

SEQ ID NO: 5174 - protein, 78 aa, Alloiococcus otitidis
MIGFILSLIIGGVIGALAQYFTQKDVPGGVIGNIIVGFLGSSLGGWLLGDLGPTVADFALLPAAIGAILVVLIYDLIF

SEQ ID NO: 5175 - DNA, 342 bp, Alloiococcus otitidis; identical to SEQ ID NO: 5173
  CDS (55)..(339)

SEQ ID NO: 5176 - protein, 95 aa, Alloiococcus otitidis
MCINPSEGIIRRGRSARMIGFILSLIIGGVIGALAQYFTQKDVPGGVIGNIIVGFLGSSLGGWLLGDLGPTVADFALLPAAIGAILVVLIYDLIF

SEQ ID NO: 5177 - DNA, 342 bp, Alloiococcus otitidis; identical to SEQ ID NO: 5173
  CDS (1)..(339)

SEQ ID NO: 5178 - protein, 113 aa, Alloiococcus otitidis
MVDSKTILLPPLKGLKLPLCINPSEGIIRRGRSARMIGFILSLIIGGVIGALAQYFTQKDVPGGVIGNIIVGFLGSSLGGWLLGDLGPTVADFALLPAAIGAILVVLIYDLIF

SEQ ID NO: 5179 - DNA, 2886 bp, Alloiococcus otitidis
  CDS (106)..(2883)
agaaggagaggagttggtatttttaccagctcgaataaaggtggtaccacgaagatttcgtccttggggatgaagtcttttttttatagaaaaggagattttaagatggaagttaaagatactttaaacttattgaaaactgatttttcaatgcgggccaagttatcccaaaaagagccggcctaccaaaaaaagtgggaagaggataaactctttgaacaaatgctagagaaaaacaaggataaggagccctttatcttacacgatggccctccttatgccaatgggaacattcacatcggccacgccttaaataaaattacaaaagatattatcaaccgctacaagaccatggcaggttactacaccccctatgtgccgggttgggatacccacggcttacctattgagtcagccttgaccaagtctggggtggaccgcaagtccatgtccgtggcggaattcagaaaattatgtgaagactatgcctgggaccaaattaaccagcaaagaaaggattttaaacgcttaggcgttcttggccgttgggacgacccttatgtgaccttgaccaaggattatgaagccgctcaaattcgagtctttagtgaaatggccctaaaaggctacatctaccggggtctcaagccagtatactggtcaccatccagtgaatcagccttggccgaagcggagatcgaatacaaggatgttagagggcctagtatttacgttagctttgatgtcaaggatggcaagggagtgcttgaccaaggcgataaaattgtgatctggaccaccaccccttggaccctaccttccaacttggctattgctgtccaccctgaaggggagtatggagtttaccaagttgagggccaaaactatgtagtggccaccaagttgattgatgaagtctctgaaaaagttggctgggaagatattgaactcgtccgaaccattaaaggggaagacttggagaatattatctgcctccacccatacttagaccgagagtctctggttatcctcggtgaccacgttactttcgatagcggaactggtttggtccacactgctccagggcacggggacgatgactatattgtctgccaaaaatatgacctgcctgtcttatcaccaattgatgacaagggttactttacagatgaagtgccagaatttgaaggcttgttctacgatgatgccaatatcaagtccaccgacctcttaaaagaaaacaatgccctccttcatatggaatttagaacccactcctaccctcatgattggcggactaaaaagccggtcattttccgggcaaccccacaatggtttgcttccattgacaagtttagacaagccatcttagatgaagtggaaaaagtcgactggatccaagactgggggatgaaacgtctttataacatggttgaaaaccggggcgactgggtcatttcccggcaacgggcttggggtgttcccctcccaatcttctacggagaagacgggacagccattatgaccgaagaaaccctccgccacgttgaagcattgattgcagagtacgggtccaatgtctggtttgaaagagatgctaaggacttacttccggaaggctttgaacacccatctagtcctaacggtcaatttaccaaggaaacagatatcatggatgtttggttcgactccgggtcttcccaccaagcagtcttgaagggccgagatgacctatcttacccagccgacctctacttggaaggctctgaccaataccggggctggtttaactccagcattaccactggggttgctgttaatggtcaggcgccttacaaggctgttctatctcaaggatttgtcttagatggggaaggctacaagatgagtaagtcagtcgggaatgtcattgaccctaatgatgttgccaacgacatgggtgctgacattatccgcttatggtctatctcagttgatacagaagctgatgtccgcgtctcacatgatatcttgaaccaagtcgctgaagtctatcgtaagatccgtaacactgtccgcttcttaatccaaaatacagaagattttgatcccaaggtcaacgaagtagactaccaagacttgtctggcttggatcagtatattcttgtccagactgaccgtttagtggaccaagtcttgactgcttattatgagtataactatctcgatatttacaagactgttaaccagttctgtacagttaccctgtctaacttctatatgaatatttccaaagacattttgtacatcgacccagaagatgcccaaagccgccgagcagtacagacagtcttctacaaaatcttacttgtcttggccaaattactggcccctgttatcccccatacggctgaagagatttggtcctacttgtctgagccagaagactacgtacaattatctgatatgccgaagcgacaaaattaccaaaatgctttagaacttgaagacaagtggagtcaatttttaagtatccgagaccatgtattaaaagctaatgaagtagcccgcgataacaagttgattgggaaagactttgaagccaaaaccaccctataccttgaccaggcaggaagagacctattggattctttggacgtcaatgttcgcctcgtcttgatcagctcccaattagatgttttggacttagcagataaaccggatgacgaccgcatcttagattttgacggcgtatctgtcttagtagagaaaatgccaggtgaagtttgcactcggtgccggatcacgactgatgatccttatgaattaccagaagacaagggttacttgtgccaacgttgccatgatattgtccaagctgactacccagaagttttagaaaattag

SEQ ID NO: 5180 - protein, 926 aa, Alloiococcus otitidis
MEVKDTLNLLKTDFSMRAKLSQKEPAYQKKWEEDKLFEQMLEKNKDKEPFILHDGPPYANGNIHIGHALNKITKDIINRYKTMAGYYTPYVPGWDTHGLPIESALTKSGVDRKSMSVAEFRKLCEDYAWDQINQQRKDFKRLGVLGRWDDPYVTLTKDYEAAQIRVFSEMALKGYIYRGLKPVYWSPSSESALAEAEIEYKDVRGPSIYVSFDVKDGKGVLDQGDKIVIWTTTPWTLPSNLAIAVHPEGEYGVYQVEGQNYVVATKLIDEVSEKVGWEDIELVRTIKGEDLENIICLHPYLDRESLVILGDHVTFDSGTGLVHTAPGHGDDDYIVCQKYDLPVLSPIDDKGYFTDEVPEFEGLFYDDANIKSTDLLKENNALLHMEFRTHSYPHDWRTKKPVIFRATPQWFASIDKFRQAILDEVEKVDWIQDWGMKRLYNMVENRGDWVISRQRAWGVPLPIFYGEDGTAIMTEETLRHVEALIAEYGSNVWFERDAKDLLPEGFEHPSSPNGQFTKETDIMDVWFDSGSSHQAVLKGRDDLSYPADLYLEGSDQYRGWFNSSITTGVAVNGQAPYKAVLSQGFVLDGEGYKMSKSVGNVIDPNDVANDMGADIIRLWSISVDTEADVRVSHDILNQVAEVYRKIRNTVRFLIQNTEDFDPKVNEVDYQDLSGLDQYILVQTDRLVDQVLTAYYEYNYLDIYKTVNQFCTVTLSNFYMNISKDILYIDPEDAQSRRAVQTVFYKILLVLAKLLAPVIPHTAEEIWSYLSEPEDYVQLSDMPKRQNYQNALELEDKWSQFLSIRDHVLKANEVARDNKLIGKDFEAKTTLYLDQAGRDLLDSLDVNVRLVLISSQLDVLDLADKPDDDRILDFDGVSVLVEKMPGEVCTRCRITTDDPYELPEDKGYLCQRCHDIVQADYPEVLEN

SEQ ID NO: 5181 - DNA, 2886 bp, Alloiococcus otitidis; identical to SEQ ID NO: 5179
  CDS (70)..(2883)

SEQ ID NO: 5182 - protein, 938 aa, Alloiococcus otitidis
MKSFFYRKGDFKMEVKDTLNLLKTDFSMRAKLSQKEPAYQKKWEEDKLFEQMLEKNKDKEPFILHDGPPYANGNIHIGHALNKITKDIINRYKTMAGYYTPYVPGWDTHGLPIESALTKSGVDRKSMSVAEFRKLCEDYAWDQINQQRKDFKRLGVLGRWDDPYVTLTKDYEAAQIRVFSEMALKGYIYRGLKPVYWSPSSESALAEAEIEYKDVRGPSIYVSFDVKDGKGVLDQGDKIVIWTTTPWTLPSNLAIAVHPEGEYGVYQVEGQNYVVATKLIDEVSEKVGWEDIELVRTIKGEDLENIICLHPYLDRESLVILGDHVTFDSGTGLVHTAPGHGDDDYIVCQKYDLPVLSPIDDKGYFTDEVPEFEGLFYDDANIKSTDLLKENNALLHMEFRTHSYPHDWRTKKPVIFRATPQWFASIDKFRQAILDEVEKVDWIQDWGMKRLYNMVENRGDWVISRQRAWGVPLPIFYGEDGTAIMTEETLRHVEALIAEYGSNVWFERDAKDLLPEGFEHPSSPNGQFTKETDIMDVWFDSGSSHQAVLKGRDDLSYPADLYLEGSDQYRGWFNSSITTGVAVNGQAPYKAVLSQGFVLDGEGYKMSKSVGNVIDPNDVANDMGADIIRLWSISVDTEADVRVSHDILNQVAEVYRKIRNTVRFLIQNTEDFDPKVNEVDYQDLSGLDQYILVQTDRLVDQVLTAYYEYNYLDIYKTVNQFCTVTLSNFYMNISKDILYIDPEDAQSRRAVQTVFYKILLVLAKLLAPVIPHTAEEIWSYLSEPEDYVQLSDMPKRQNYQNALELEDKWSQFLSIRDHVLKANEVARDNKLIGKDFEAKTTLYLDQAGRDLLDSLDVNVRLVLISSQLDVLDLADKPDDDRILDFDGVSVLVEKMPGEVCTRCRITTDDPYELPEDKGYLCQRCHDIVQADYPEVLEN

SEQ ID NO: 5183 - DNA, 2886 bp, Alloiococcus otitidis; identical to SEQ ID NO: 5179
  CDS (64)..(2883)

SEQ ID NO: 5184 - protein, 940 aa, Alloiococcus otitidis
MGMKSFFYRKGDFKMEVKDTLNLLKTDFSMRAKLSQKEPAYQKKWEEDKLFEQMLEKNKDKEPFILHDGPPYANGNIHIGHALNKITKDIINRYKTMAGYYTPYVPGWDTHGLPIESALTKSGVDRKSMSVAEFRKLCEDYAWDQINQQRKDFKRLGVLGRWDDPYVTLTKDYEAAQIRVFSEMALKGYIYRGLKPVYWSPSSESALAEAEIEYKDVRGPSIYVSFDVKDGKGVLDQGDKIVIWTTTPWTLPSNLAIAVHPEGEYGVYQVEGQNYVVATKLIDEVSEKVGWEDIELVRTIKGEDLENIICLHPYLDRESLVILGDHVTFDSGTGLVHTAPGHGDDDYIVCQKYDLPVLSPIDDKGYFTDEVPEFEGLFYDDANIKSTDLLKENNALLHMEFRTHSYPHDWRTKKPVIFRATPQWFASIDKFRQAILDEVEKVDWIQDWGMKRLYNMVENRGDWVISRQRAWGVPLPIFYGEDGTAIMTEETLRHVEALIAEYGSNVWFERDAKDLLPEGFEHPSSPNGQFTKETDIMDVWFDSGSSHQAVLKGRDDLSYPADLYLEGSDQYRGWFNSSITTGVAVNGQAPYKAVLSQGFVLDGEGYKMSKSVGNVIDPNDVANDMGADIIRLWSISVDTEADVRVSHDILNQVAEVYRKIRNTVRFLIQNTEDFDPKVNEVDYQDLSGLDQYILVQTDRLVDQVLTAYYEYNYLDIYKTVNQFCTVTLSNFYMNISKDILYIDPEDAQSRRAVQTVFYKILLVLAKLLAPVIPHTAEEIWSYLSEPEDYVQLSDMPKRQNYQNALELEDKWSQFLSIRDHVLKANEVARDNKLIGKDFEAKTTLYLDQAGRDLLDSLDVNVRLVLISSQLDVLDLADKPDDDRILDFDGVSVLVEKMPGEVCTRCRITTDDPYELPEDKGYLCQRCHDIVQADYPEVLEN

SEQ ID NO: 5185 - DNA, 753 bp, Alloiococcus otitidis
  CDS (28)..(750)
actagtttcacgctaggaggaagacggatgtcgattacgtcagatgagattaaaaacaaagccttttccacccgtttaaggggttatgaccaagcggaagtagccagctttttaaatgaagtgagccaggcctatagagacctagaccaaaaaaaccaagacttagaagaaaagttggaccgtttaaccgaaagattggatgaatatgttgagaaacatgattcccttaaccggtccatcttagttgcccaggatgctgcagaccggctgaaagaagatgcccatgcagaggccaaccacttggttaccgaggccagggaggaagctgatcgggtccgccagacatctaagcttgaagcccggcaaatcctctctgaggcgattgataatgtccacttcgtccaagaagaaatggaagccttgagacaagagagtgtccgctttaaaaaaggcctccacgacatggttaagacctatcattcaaccctgatggacaaccgttgggacaaggtcatgagcctcaaaacctttaagcaaattgacttagacaagacccaagaggctgttgaattaaaggctaaactatcggaccaagatcaagctgaagaccaagattccagttttgaatccagtaatgatcagccagaccaagaccaaatagatcaagatggccaaagaccagcccaggaaataccggctggccaggaagaggatcaaaaagataaagatgaaagaagcaaagattctgactaa

SEQ ID NO: 5186 - protein, 241 aa, Alloiococcus otitidis
MSITSDEIKNKAFSTRLRGYDQAEVASFLNEVSQAYRDLDQKNQDLEEKLDRLTERLDEYVEKHDSLNRSILVAQDAADRLKEDAHAEANHLVTEAREEADRVRQTSKLEARQILSEAIDNVHFVQEEMEALRQESVRFKKGLHDMVKTYHSTLMDNRWDKVMSLKTFKQIDLDKTQEAVELKAKLSDQDQAEDQDSSFESSNDQPDQDQIDQDGQRPAQEIPAGQEEDQKDKDERSKDSD

SEQ ID NO: 5187 - DNA, 798 bp, Alloiococcus otitidis
  CDS (10)..(795)
ctaaaggatatgaccatggaagacttataccaacactttagaccgaatgaaaaagattatattgacctagcaatggattgggtaaggcgtgtaagtgatacttatgctccttacctaacctcatttctggaccccagacaagcttatatcttagctactattgttgcccagtaccctgacttgcaggtttcctattggggcggacacccaggggcagagcgtcaacgtggcttgatttatccagattatttacccactcatgaattgagctatgacattgctggttttgaaatcgactacccccacaaatttaataagctcagccacgggcaaattatggggtctattttagggacgggtatcaagcgggataaattaggggacatcatatcggattcgggacgctggcaattttttattgaccagggcctgagtgattttatcaccatccaggtcgaccgggtgggatccagtcctgtacgtttatactccctaaaccagtccgacattatcgataaccaggaagattggaccgtagaccaggttattgtttcttctttaaggctggattcctttattgcatcttgtttgaacttggcccggtccaaggctaaaagtctggttgaccaagaccgggtcaagcttaactttggccaggttgaccaagctggcctggttttagaagaagaggatatggtttctgttcggggctttggtcgcttgcaatttctaagggcggtcaagcagacaaagaaggacaaggtattgatcgaagtcaaaaaattattgcataaatag

SEQ ID NO: 5188 - protein, 262 aa, Alloiococcus otitidis
MTMEDLYQHFRPNEKDYIDLAMDWVRRVSDTYAPYLTSFLDPRQAYILATIVAQYPDLQVSYWGGHPGAERQRGLIYPDYLPTHELSYDIAGFEIDYPHKFNKLSHGQIMGSILGTGIKRDKLGDIISDSGRWQFFIDQGLSDFITIQVDRVGSSPVRLYSLNQSDIIDNQEDWTVDQVIVSSLRLDSFIASCLNLARSKAKSLVDQDRVKLNFGQVDQAGLVLEEEDMVSVRGFGRLQFLRAVKQTKKDKVLIEVKKLLHK

SEQ ID NO: 5189 - DNA, 513 bp, Alloiococcus otitidis
  CDS (31)..(510)
caagtgatccactatttatgcaataattttttgacttcgatcaataccttgtccttctttgtctgcttgaccgcccttagaaattgcaagcgaccaaagccccgaacagaaaccatatcctcttcttctaaaaccaggccagcttggtcaacctggccaaagttaagcttgacccggtcttggtcaaccagacttttagccttggaccgggccaagttcaaacaagatgcaataaaggaatccagccttaaagaagaaacaataacctggtctacggtccaatcttcctggttatcgataatgtcggactggtttagggagtataaacgtacaggactggatcccacccggtcgacctggatggtgataaaatcactcaggccctggtcaataaaaaattgccagcgtcccgaatccgatatgatgtcccctaatttatcccgcttgatacccgtccctaaaatagaccccataatttgcccgtggctgagcttattaaatttgtgggggtag

SEQ ID NO: 5190 - protein, 160 aa, Alloiococcus otitidis
MTSINTLSFFVCLTALRNCKRPKPRTETISSSSKTRPAWSTWPKLSLTRSWSTRLLALDRAKFKQDAIKESSLKEETITWSTVQSSWLSIMSDWFREYKRTGLDPTRSTWMVIKSLRPWSIKNCQRPESDMMSPNLSRLIPVPKIDPIICPWLSLLNLWG

SEQ ID NO: 5191 - DNA, 513 bp, Alloiococcus otitidis; identical to SEQ ID NO: 5189
  CDS (4)..(510)

SEQ ID NO: 5192 - protein, 169 aa, Alloiococcus otitidis
MIHYLCNNFLTSINTLSFFVCLTALRNCKRPKPRTETISSSSKTRPAWSTWPKLSLTRSWSTRLLALDRAKFKQDAIKESSLKEETITWSTVQSSWLSIMSDWFREYKRTGLDPTRSTWMVIKSLRPWSIKNCQRPESDMMSPNLSRLIPVPKIDPIICPWLSLLNLWG

SEQ ID NO: 5193 - DNA, 288 bp, Alloiococcus otitidis
  CDS (1)..(285)
atgtccaatttaatagtgatccttggtgaaattagccttcaattgattaacctttaccgttggttgcttttgatttactttttactatcttggttgcccggtgcctaccaatcgacacttggacaagttttggtaaaattatgtgagccctatgtggggatatttagacagtttattcccccaattggtcgcatcagtattgcgggcttagtggcttatttttccctcttttttgtcgaacagggagtagtagcgattgtcaacctcctgcttagatatgtcttttag

SEQ ID NO: 5194 - protein, 95 aa, Alloiococcus otitidis
MSNLIVILGEISLQLINLYRWLLLIYFLLSWLPGAYQSTLGQVLVKLCEPYVGIFRQFIPPIGRISIAGLVAYFSLFFVEQGVVAIVNLLLRYVF

SEQ ID NO: 5195 - DNA, 474 bp, Alloiococcus otitidis
  CDS (13)..(471)
aaggataataggatgagtttgaaagagacattttcgaattttttcatgcttgatgatgaagaaggtagtcaagaccaagcagtcaagcaaaaggagcccaggctagcgacaggacaaagtcgtcaaccaggaggagcaagctccaccccgcaagaggaagacaagagtggaggactcagtttggtatccatgaataaaaatcaaagtcaaaagcttcggattaaggttgtagagcccagactctattctgaagtaaaggaaatagcagatttagtgttgaccaaccagtccgttatcttaaattttcgccggatggataaggaccaggctaagaaagtcattgactttatgatgggagtcacctacgcgatcggtggcgacatccaaagggtaggcgaccagatattccttgcaactccagccaatattgaaattgatgcaaatgacatttcaggcttggaccgtgaggaataa

SEQ ID NO: 5196 - protein, 153 aa, Alloiococcus otitidis
MSLKETFSNFFMLDDEEGSQDQAVKQKEPRLATGQSRQPGGASSTPQEEDKSGGLSLVSMNKNQSQKLRIKVVEPRLYSEVKEIADLVLTNQSVILNFRRMDKDQAKKVIDFMMGVTYAIGGDIQRVGDQIFLATPANIEIDANDISGLDREE

SEQ ID NO: 5197 - DNA, 438 bp, Alloiococcus otitidis
  CDS (19)..(435)
ccctctttgaagctcaagatgcttctgatatcgtcggggctgctgcttctggtgatgttaatattatcttcggtacttccatcaatgaagacctggaagatgaggtcatcgttaccgttattgcaactggtatcactggtaaagacatgggcgagaaatcttctaaatcctcaaaccgtagccaaggtcctagtcaaaaaagtcaagctcgatcagctagtgagtctagcttctctagctggcaaaaccaatccaatgaaagaccaggggaagaccaagaccgaccaagctctcaaagacgggaagtcgatcggtccgaaaacctgttcaatgacgatagtaaggaccagccagcagactctggtgatgatgacgaattggatacccctcctttctttagacgtcgccgcaagaattagtgcccttttgaaaggataa

SEQ ID NO: 5198 - protein, 139 aa, Alloiococcus otitidis
MLLISSGLLLLVMLILSSVLPSMKTWKMRSSLPLLQLVSLVKTWARNLLNPQTVAKVLVKKVKLDQLVSLASLAGKTNPMKDQGKTKTDQALKDGKSIGPKTCSMTIVRTSQQTLVMMTNWIPLLSLDVAARISALLKG

SEQ ID NO: 5199 - DNA, 438 bp, Alloiococcus otitidis; identical to SEQ ID NO: 5197
  CDS (7)..(435)

SEQ ID NO: 5200 - protein, 143 aa, Alloiococcus otitidis
MKLKMLLISSGLLLLVMLILSSVLPSMKTWKMRSSLPLLQLVSLVKTWARNLLNPQTVAKVLVKKVKLDQLVSLASLAGKTNPMKDQGKTKTDQALKDGKSIGPKTCSMTIVRTSQQTLVMMTNWIPLLSLDVAARISALLKG

SEQ ID NO: 5201 - DNA, 1260 bp, Alloiococcus otitidis
  CDS (28)..(1257)
ataaggatttcaggaggaatactcataatggatttcaacttagataatacagtttcaggtggcgcaaagattaaggttattggtgttggcggtgctggtggcaatgccgttaaccggatgattgaagatggagtcgaaggcgttgaatttattgtagccaatacagatgtccaagcccttgatgccaaccgagctgagactaaaattcaactcggagagaagttaaccaggggactcggtgccggagctaatccagaagttggccgtaagtcggctgaagagagtgaagaaaccattgccgaagctcttgaaggagctgacatggtcttcgttactgctggtatgggtggcggtactggtactggcggggcgggcattattgcccgcattgccaaagaacaaggggctttgactgtaggggttattacccggccgttcacttttgaaggaccaaaacgtgggcgctttgcagccgaagggattgcccaaatgcgggaacatgttgacacccttgtcaccatctccaacaaccgcttgctagaaattgtggacaagaaaacaccgatgatggaagccttcagagaagcagataatgtcctccgccaaggggttcaaggtatatctgacttgattaccaatccaggctacgtcaacttagactttgccgatgtcaaaacggtgatggccaaccaaggttctgccttgatggggattgggtctgcttcaggtgagaatagaacggctgaagctactaagaaagctatttcatctccacttttggaagtctccctcaatggggctgaaaatgtcctattaaacataaccggaaaccaagacttaaccctctttgaagctcaagatgcttctgatatcgtcggggctgctgcttctggtgatgttaatattatcttcggtacttccatcaatgaagacctggaagatgaggtcatcgttaccgttattgcaactggtatcactggtaaagacatgggcgagaaatcttctaaatcctcaaaccgtagccaaggtcctagtcaaaaaagtcaagctcgatcagctagtgagtctagcttctctagctggcaaaaccaatccaatgaaagaccaggggaagaccaagaccgaccaagctctcaaagacgggaagtcgatcggtccgaaaacctgttcaatgacgatagtaaggaccagccagcagactctggtgatgatgacgaattggatacccctcctttctttagacgtcgccgcaagaattag

SEQ ID NO: 5202 - protein, 410 aa, Alloiococcus otitidis
MDFNLDNTVSGGAKIKVIGVGGAGGNAVNRMIEDGVEGVEFIVANTDVQALDANRAETKIQLGEKLTRGLGAGANPEVGRKSAEESEETIAEALEGADMVFVTAGMGGGTGTGGAGIIARIAKEQGALTVGVITRPFTFEGPKRGRFAAEGIAQMREHVDTLVTISNNRLLEIVDKKTPMMEAFREADNVLRQGVQGISDLITNPGYVNLDFADVKTVMANQGSALMGIGSASGENRTAEATKKAISSPLLEVSLNGAENVLLNITGNQDLTLFEAQDASDIVGAAASGDVNIIFGTSINEDLEDEVIVTVIATGITGKDMGEKSSKSSNRSQGPSQKSQARSASESSFSSWQNQSNERPGEDQDRPSSQRREVDRSENLFNDDSKDQPADSGDDDELDTPPFFRRRRKN

SEQ ID NO: 5203 - DNA, 1377 bp, Alloiococcus otitidis
  CDS (13)..(1374)
acagataatagaatgtttttagatatggaggtttcaatgaatatgaaaaatggggtttatacaagccttgatattggaaccacttcaataaaagtagttgtcagtgaagttgataataatcagctcaaagttattggagtaggaaaagctcaatcaaaaggtttaaaaaggggcatggttgtcgatatagatgctaccgtccaggccattcatactgcagtgaagcaggctgctgataagactggtgttatgatcaaccagctcattgttggagttcctgctaatggtgttagtattgaaccctgtcacggggtcattactgtagatgaccggtccaaggaaatagacagccaggaagtgaaccgggtagtcaaccagtccattgctaatatcgttccgccagatagagacttattatccgtcagtttagaagaatttattgtagatggttttgatgaaattcatgatccgagaggcatggtgggccagcggttagaactttacgggacagcaatttcagtgcctaaaacaattttacataacattagacgttgtgttgaaaaagcgggctatcaaattgctgccttaattctccagccccaagccatggccaaggtagccttgtctgaggatgagcggaattttggtacagttatggtggatataggcggaggtcaaacgaccctatcagccattcacgatgagcaagtgaagtatgccaatgtggtccaagaagccggagaatatattaccaaagacatttccattgtcatcaacacctcacagcaaaatgcagaaaagctcaaaagagaagttggggccattaaaagtcagtctgattcaactgttcaagtagatgttgtaggtcaaaatgaacctgtgaagattaaagaatcctatgtcggtgaaattattgaagcccgggttagccaaatctttgaaaaagtgaaggctgaccttgacccaattaacgccttccaattgccaggtggtgccgttatttccggcggttcagctgccataccaggtattgacagcttggctgaagacatcttcaaggttcggtcagagctctacattcccgactacatgggtatccgaactcccgccttcactgtggcagtcggcttgaccctctaccaagcccagacttctgatattgagcgggccatcaaccagtccatcttgcaaaatatcggtattaatccagatagccagcctgctaaccggatagttgaccaggatgattcagtccaaagtcaggaccaaaagacgcaagatgagccagcaggagaccaagctagtcagtcggatagtccagaagaaggcaattttacagacagaatcaagcatttctttactacatttttcgattaa

SEQ ID NO: 5204 - protein, 454 aa, Alloiococcus otitidis
MFLDMEVSMNMKNGVYTSLDIGTTSIKVVVSEVDNNQLKVIGVGKAQSKGLKRGMVVDIDATVQAIHTAVKQAADKTGVMINQLIVGVPANGVSIEPCHGVITVDDRSKEIDSQEVNRVVNQSIANIVPPDRDLLSVSLEEFIVDGFDEIHDPRGMVGQRLELYGTAISVPKTILHNIRRCVEKAGYQIAALILQPQAMAKVALSEDERNFGTVMVDIGGGQTTLSAIHDEQVKYANVVQEAGEYITKDISIVINTSQQNAEKLKREVGAIKSQSDSTVQVDVVGQNEPVKIKESYVGEIIEARVSQIFEKVKADLDPINAFQLPGGAVISGGSAAIPGIDSLAEDIFKVRSELYIPDYMGIRTPAFTVAVGLTLYQAQTSDIERAINQSILQNIGINPDSQPANRIVDQDDSVQSQDQKTQDEPAGDQASQSDSPEEGNFTDRIKHFFTTFFD

SEQ ID NO: 5205 - DNA, 939 bp, Alloiococcus otitidis
  CDS (1)..(936)
atggtgaaaactaagggtaagttcggtcctcaaagcaaaaaaacgagccgtataaaggcggcttctttgatcctggtcttttccttcatttttctaacaagcttctacctcctttcgcccttgaacaagattgaaaccattcaagttgaaggcaatgacaaagtgtctgatgaagaagttatccaatccagtggcttgcagctagccagtcccatggtagaaacctggctagaccgaagttactacggcaaggtcctgctagaccgagaagactatatccaagccgttacaataagcatggatgactaccagacccttggtgttagggttgaagagtatgatctcttaggccaaatccacctgaatgctgaagaagaggggtcagagggtctttatgacatcttagaaaacaaggatttaacactagtccaagactcaagagattctgtccccttgcttttgaactttgatcctaggagtgacttgtttgaccagcttttaggagagttaaaggagaccaacgattcggtcttaagccagatttccgaaattgaatggcttgacttggaccgtaatcctaagttattaaaattaaatatggtagacggcaaccaggtcttaatcaatgttccctactttgcccgccgaataaactattatccacaactcactgcagccgtagaccaagtgccaggtctctttgacctcgaagctggtagcttctttagaccctttgaccaagaagcggaagtggaagaaactgaccaggacaaagaagaaggtcaagaaaatcaagatgggtctcaaggccaagaagaaggtcgtttaaaccaagaggactcccaagaccaagaagtgaattcagctggtcttgaagcccctgaaactgccccggccaatccagttgacccctcccaagctgactctcaaacagagtag

SEQ ID NO: 5206 - protein, 312 aa, Alloiococcus otitidis
MVKTKGKFGPQSKKTSRIKAASLILVFSFIFLTSFYLLSPLNKIETIQVEGNDKVSDEEVIQSSGLQLASPMVETWLDRSYYGKVLLDREDYIQAVTISMDDYQTLGVRVEEYDLLGQIHLNAEEEGSEGLYDILENKDLTLVQDSRDSVPLLLNFDPRSDLFDQLLGELKETNDSVLSQISEIEWLDLDRNPKLLKLNMVDGNQVLINVPYFARRINYYPQLTAAVDQVPGLFDLEAGSFFRPFDQEAEVEETDQDKEEGQENQDGSQGQEEGRLNQEDSQDQEVNSAGLEAPETAPANPVDPSQADSQTE

SEQ ID NO: 5207 - DNA, 1179 bp, Alloiococcus otitidis
  CDS (820)..(1176)
agcaaaggagcaagtatggaaactaaaaaacaagcattaaaagttttattatcaggcggtggaacaggtggccatatctacccagccttggcccttgctaagcacctagctagcttacactcagatgtcgagtttttgtatgttggcactcaaaggggattggaaaataaattggtcccccaagcaggacttgactttatcccgatcaaagtagaaggatttagccggaagtttaacttcaaaagcattaaatataatactaaaagtctgatttattttctaaaggccctgagtaagtctaagcaaatcatcaaagactttcagccagatgtggtaatagggacaggtggttatgtttgtgcccctgtcatataccaggcgaccaagttaggcattccaagtctcattcacgaacaaaatagtgtcgccggggtgaccaataagtttttggctcggtacgtagacaagattgccctaagtttccaggaagctgaaaaatcctttgccaagtataaggataagctggttttgactggtaatccaagaggacaggaagtcagccaagtcaagggtggccttagcctccacaagtatggcatggacatgtcccaaccttcagtaattatttttggtgggtcaaggggggcttatgctattaataaggcctttgttgaggcatatagtcaactggctgagagggactaccaggtcttgtttgtgccgggatcagctaattttagccggataaaacaggaaattgataaccgctatggccagcataagccgtcaaacatttttattgaatcctatatcgataacatgccccaagtttttaaggctattgacttggtggtttgccgtagtggggccactaccctagccgaaattatgtcattaggcttggccagcattttaattccaagtcccaatgtaacggctgaccaccaaaccaaaaatgctatgagtttggttaaccaacaagctggcttaatgattaaggaaaatgatctaaatggccaaagcctcttaaactgcttagatgacctgatgcatgatgacgcaaaaagaaacaagatggcccaacaagcgaaagaaatgggccaaccccaagcttcagacaagttgatcgctctcatcttgtccatggttaaggaagatattaactcagacatcgattaa

SEQ ID NO: 5208 - protein, 119 aa, Alloiococcus otitidis
MPQVFKAIDLVVCRSGATTLAEIMSLGLASILIPSPNVTADHQTKNAMSLVNQQAGLMIKENDLNGQSLLNCLDDLMHDDAKRNKMAQQAKEMGQPQASDKLIALILSMVKEDINSDID

SEQ ID NO: 5209 - DNA, 1179 bp, Alloiococcus otitidis; identical to SEQ ID NO: 5207
  CDS (16)..(1176)

SEQ ID NO: 5210 - protein, 387 aa, Alloiococcus otitidis
METKKQALKVLLSGGGTGGHIYPALALAKHLASLHSDVEFLYVGTQRGLENKLVPQAGLDFIPIKVEGFSRKFNFKSIKYNTKSLIYFLKALSKSKQIIKDFQPDVVIGTGGYVCAPVIYQATKLGIPSLIHEQNSVAGVTNKFLARYVDKIALSFQEAEKSFAKYKDKLVLTGNPRGQEVSQVKGGLSLHKYGMDMSQPSVIIFGGSRGAYAINKAFVEAYSQLAERDYQVLFVPGSANFSRIKQEIDNRYGQHKPSNIFIESYIDNMPQVFKAIDLVVCRSGATTLAEIMSLGLASILIPSPNVTADHQTKNAMSLVNQQAGLMIKENDLNGQSLLNCLDDLMHDDAKRNKMAQQAKEMGQPQASDKLIALILSMVKEDINSDID

SEQ ID NO: 5211 - DNA, 1428 bp, Alloiococcus otitidis
  CDS (25)..(1425)
cgttacttagaaaggtttggcaagatggttgattcggtattttgcaataagaaggttttagttttaggcttggcaaaaagcgggctcagtgcggcccatttgttaaaaaaactaggggccaaggtcatcgtcaatgacaagttggccctagaaaataatacggaagcccaggtcttaattgaagagggcttccaagttatcaccggctaccacccagaggatttacttgatgcaagctttgactttgtcgtcaagaatccgggcattccttacaccaatccagtggtaggccaggctgaaaaactggctattcccattttaactgaagtggacgtggcaggaagcatcttaaaagccaagcccatcgctgttaccgggaccaatggcaagacaactaccgtatctttaatttatgatattttagcccaagatcaagcggaaagccctgaacctaaaccagtctacaagctaggcaatattggccaaccggttagtgacttggccttagaaattaaagctgaatctaacctggttgtcgaactctctagtttccaactacagtcactgacctatttcacccctcatatagcagtcattaccaatatttattccgcccaccttgactaccataagagtcgggaggaatatgttagggctaagctaaggattacccaggctcaaggtccggatgactacctagtctactaccagggtcaggaagaattggctagcctggtcaaaaaatactctaaagcccagctggtcccctatactgacaagggtcaactgaaccaaggagcctatatcaaggatgactatcttatctataatcaagagccagtcatggctttagaccgagttcaagtttctggtagccacaacttacaaaatattttagcagctgtttgcgtagctaaaataaaggggctctctaaccaaaccattgcccaagctgtcaaccacttcaaaggggttgcccaccgcagccaggtggttgggcggtatgaggaccggctttttgtcaacgactctaaggcaaccaatagcttggccacacagaaggcattagaagcctatgaccaagataccatcttgttagtgggtggcctagaccgccaagatgatttttccaagcttgaccatgctctaaacagggttaagggggtcgtttgttttggccagaccaaagataagttagcccggtattttaaagaccgtcacattgagggtgttgagcttgcccagacagttcctgaagcagttgatttggcttacgacttgagtgagccaggacaagtcattttattttctcctgcttgtgcaagttgggaccaatatgctaactttgaagagagaggacaagattatgttgatgcaatccagcagctggttgaaagactagagcaaaggagcaagtatggaaactaa

SEQ ID NO: 5212 - protein, 467 aa, Alloiococcus otitidis
MVDSVFCNKKVLVLGLAKSGLSAAHLLKKLGAKVIVNDKLALENNTEAQVLIEEGFQVITGYHPEDLLDASFDFVVKNPGIPYTNPVVGQAEKLAIPILTEVDVAGSILKAKPIAVTGTNGKTTTVSLIYDILAQDQAESPEPKPVYKLGNIGQPVSDLALEIKAESNLVVELSSFQLQSLTYFTPHIAVITNIYSAHLDYHKSREEYVRAKLRITQAQGPDDYLVYYQGQEELASLVKKYSKAQLVPYTDKGQLNQGAYIKDDYLIYNQEPVMALDRVQVSGSHNLQNILAAVCVAKIKGLSNQTIAQAVNHFKGVAHRSQVVGRYEDRLFVNDSKATNSLATQKALEAYDQDTILLVGGLDRQDDFSKLDHALNRVKGVVCFGQTKDKLARYFKDRHIEGVELAQTVPEAVDLAYDLSEPGQVILFSPACASWDQYANFEERGQDYVDAIQQLVERLEQRSKYGN

SEQ ID NO: 5213 - DNA, 963 bp, Alloiococcus otitidis
  CDS (169)..(960)
gagatatttatgattaatttacaactcatctggcccttcttaagcggcctggtcctgtcccttatccttatgcccttagtgattaaatactttaggcgtaaacaattaggccaaaccacccgggaaattggcccaagttggcaccaaagtaagagtggaaccccaaccatgggtggcctagcctttatcttatcggttacggtgaccatcgctttggcctttttaatcgggacgggaaccaaagatatcgctttgctcttaatggtctttttggtttacggcttgattggctttctagatgattatatcaagctagtgatgaaacggaacttggggctcacctccttgcaaaaattactgggtcaaatcctagctgccttggtattttattttatcgccgatgtttcgactatcgtcaacctgcccttctccctctccattaacttgggcttcctctaccccttatttgtcgttttttggttggttggtttttccaatgcgactaatttaacagatggtatcgatggcctgttagggactactagtatcctagccttgctagcttatagttttatagctgtctggcaggaacaatatgatgtcctcttgttcatcttaagtttagtgggtggcttgctaggctttttggcctttaacattaaaccagccaagatttttatgggagatgtgggatctttggccatcggtggcgtctttgctagcttatccattatcttaaaccaagaatggaccttgttattcattggcctagtctttgttgtagaaacagccagtgtgatcttacaagtggcttcatataaaacaaggggcaagcggatctttaagatgacccccatccaccaccactttgaaatgaatggctatagtgaatggaaaatagtcattgttttttcagttgttaccatcattacttctttagtcacgatttggatggtggtataa

SEQ ID NO: 5214 - protein, 264 aa, Alloiococcus otitidis
MGGLAFILSVTVTIALAFLIGTGTKDIALLLMVFLVYGLIGFLDDYIKLVMKRNLGLTSLQKLLGQILAALVFYFIADVSTIVNLPFSLSINLGFLYPLFVVFWLVGFSNATNLTDGIDGLLGTTSILALLAYSFIAVWQEQYDVLLFILSLVGGLLGFLAFNIKPAKIFMGDVGSLAIGGVFASLSIILNQEWTLLFIGLVFVVETASVILQVASYKTRGKRIFKMTPIHHHFEMNGYSEWKIVIVFSVVTIITSLVTIWMVV

SEQ ID NO: 5215 - DNA, 963 bp, Alloiococcus otitidis; identical to SEQ ID NO: 5213
  CDS (10)..(960)

SEQ ID NO: 5216 - protein, 317 aa, Alloiococcus otitidis
MINLQLIWPFLSGLVLSLILMPLVIKYFRRKQLGQTTREIGPSWHQSKSGTPTMGGLAFILSVTVTIALAFLIGTGTKDIALLLMVFLVYGLIGFLDDYIKLVMKRNLGLTSLQKLLGQILAALVFYFIADVSTIVNLPFSLSINLGFLYPLFVVFWLVGFSNATNLTDGIDGLLGTTSILALLAYSFIAVWQEQYDVLLFILSLVGGLLGFLAFNIKPAKIFMGDVGSLAIGGVFASLSIILNQEWTLLFIGLVFVVETASVILQVASYKTRGKRIFKMTPIHHHFEMNGYSEWKIVIVFSVVTIITSLVTIWMVV

SEQ ID NO: 5217 - DNA, 2298 bp, Alloiococcus otitidis
  CDS (91)..(2295)
ataatgaaaccgaatagccagcccaaaagtcgtggacatagaaataagagacggtttggttatgtcatgatcgcggttagcttcttccttatggcttttgtggtggtcagactggccggaatcatgttgctaggtcgggctggggggcaagacctagaagaccgggttagccagttgtacaagggagatgacctcctcttagccgagagagggaccatctatgaccagaacaataaccccatagccgtggacgccaagacttataaaatgacggccattttaactgaccaatgggccccagattctcggcccatccatgtccaagaccctgaccaagttgctagggtcttgtctaaccacctggccattagctatgaccaagctctggaaaaattagagtctgatgctagccaggtggaatttggaacagttggcaacaagttatcctatgatacggttggccaaatacagagcgatttggaagaccaaggcttaacaggcattacttttgaagaaaaccagtctcgtctgtacccgaatgggacttttgcttcaaatattattggactagcccaggatactagcgagtcggaccaggtagatgaccaagaccgtgatgaaaatgaccaaattcaaggggtcatgggcctggaagaggagtttaatgaccaattaacgggggaaaacggggtcattaattaccaacaggaccggtatggttatattttgcccaaccagaaagtccaggcccaagagtctgttgacggggacgacctccatttaaccttggaccgtcgcttgcaaacttatctagaaaatattctagaccaagtccaggctgaccataagcccaaaacaatgactgcaacagtaatggatgcaaaaaatggtgctatcttagcttccagtcagcggcctagctttaatgccacaaccctggaggggattgaccaatcctggcagaacctcctagtcgattatgaaatagaaccaggctcaaccctcaaggttattactctggcagcagccattgaagagggggtctttgacccaaatgcctatttcgagtcaggtacttatgaagtggcaggaggccgggttagggatgtcaaaccaggaggctggggaaccattacctacctggaaggacttttccggtctagtaatgtggcctttgtcaaattggtcgaggctatgggacttgaaacctggaagtcttacttggatgccttcggctttggtcaagtgactggtattgaattaccaaatgaaagacctggccaaaaccccttcctttgggacttgcaaaaagtcaacacggcttttggtcagggaattaccgtcactcctatccagatgctccaagcctttaccgccattagcaatcaaggagaaatggttcggccgaatattataaaagacattgaccaggaaggtgaagaagaccaatccaaagttgaaactgaaaaccaggacggccaggtggtgggccagcccatttctcgagaaactgcccaaaaaaccttggactacctacgaatgggggtagaaagtgatataggtaccaccaatggctatcaaattgagggagttccagttgctgctaagacagggactgctcagatcgttaacccagaaactggtcaatattattcttctaacggggagtatatttactcagttgtcaccatgttgccagctgatgatccggaatatatcctttatattacggtccaacagcctcaattgactgaagaagttaattatggtggccaggtggtcaagcaaatttttgaccccttgagtcaacggcttctactcgaagaaggggttgaccatggtgtggaagatttccaagatgacttacaagaagtaccgaacttgatcgaaaaagataaggaagaagcccttgacctagttgaagaagctgatttggattacagtttagttggtcaaggtgataaaattgtccagcaatcacctggccaagctggtcaagttgccagtggccagaaggtcattttagtgactaatggggccatgaccctaccagacttaagaggctggtctaagagtgatttggtacgcttaagtgatttgactgggatagacttggaaattgaaggagaaggttatgtgaccagtcaagatagtccggcccaaaccaccattgaatctggcgacccagttaaagtgaccatgtctgatccatcaggtgaatccagtcaaacaagtcacgagtccaacattcctgaccatccagaccaggcttgggatgagtcaacttttgctgaatag

SEQ ID NO: 5218 - protein, 735 aa, Alloiococcus otitidis
MAFVVVRLAGIMLLGRAGGQDLEDRVSQLYKGDDLLLAERGTIYDQNNNPIAVDAKTYKMTAILTDQWAPDSRPIHVQDPDQVARVLSNHLAISYDQALEKLESDASQVEFGTVGNKLSYDTVGQIQSDLEDQGLTGITFEENQSRLYPNGTFASNIIGLAQDTSESDQVDDQDRDENDQIQGVMGLEEEFNDQLTGENGVINYQQDRYGYILPNQKVQAQESVDGDDLHLTLDRRLQTYLENILDQVQADHKPKTMTATVMDAKNGAILASSQRPSFNATTLEGIDQSWQNLLVDYEIEPGSTLKVITLAAAIEEGVFDPNAYFESGTYEVAGGRVRDVKPGGWGTITYLEGLFRSSNVAFVKLVEAMGLETWKSYLDAFGFGQVTGIELPNERPGQNPFLWDLQKVNTAFGQGITVTPIQMLQAFTAISNQGEMVRPNIIKDIDQEGEEDQSKVETENQDGQVVGQPISRETAQKTLDYLRMGVESDIGTTNGYQIEGVPVAAKTGTAQIVNPETGQYYSSNGEYIYSVVTMLPADDPEYILYITVQQPQLTEEVNYGGQVVKQIFDPLSQRLLLEEGVDHGVEDFQDDLQEVPNLIEKDKEEALDLVEEADLDYSLVGQGDKIVQQSPGQAGQVASGQKVILVTNGAMTLPDLRGWSKSDLVRLSDLTGIDLEIEGEGYVTSQDSPAQTTIESGDPVKVTMSDPSGESSQTSHESNIPDHPDQAWDESTFAE

SEQ ID NO: 5219 - DNA, 2298 bp, Alloiococcus otitidis; identical to SEQ ID NO: 5217
  CDS (4)..(2295)

SEQ ID NO: 5220 - protein, 764 aa, Alloiococcus otitidis
MKPNSQPKSRGHRNKRRFGYVMIAVSFFLMAFVVVRLAGIMLLGRAGGQDLEDRVSQLYKGDDLLLAERGTIYDQNNNPIAVDAKTYKMTAILTDQWAPDSRPIHVQDPDQVARVLSNHLAISYDQALEKLESDASQVEFGTVGNKLSYDTVGQIQSDLEDQGLTGITFEENQSRLYPNGTFASNIIGLAQDTSESDQVDDQDRDENDQIQGVMGLEEEFNDQLTGENGVINYQQDRYGYILPNQKVQAQESVDGDDLHLTLDRRLQTYLENILDQVQADHKPKTMTATVMDAKNGAILASSQRPSFNATTLEGIDQSWQNLLVDYEIEPGSTLKVITLAAAIEEGVFDPNAYFESGTYEVAGGRVRDVKPGGWGTITYLEGLFRSSNVAFVKLVEAMGLETWKSYLDAFGFGQVTGIELPNERPGQNPFLWDLQKVNTAFGQGITVTPIQMLQAFTAISNQGEMVRPNIIKDIDQEGEEDQSKVETENQDGQVVGQPISRETAQKTLDYLRMGVESDIGTTNGYQIEGVPVAAKTGTAQIVNPETGQYYSSNGEYIYSVVTMLPADDPEYILYITVQQPQLTEEVNYGGQVVKQIFDPLSQRLLLEEGVDHGVEDFQDDLQEVPNLIEKDKEEALDLVEEADLDYSLVGQGDKIVQQSPGQAGQVASGQKVILVTNGAMTLPDLRGWSKSDLVRLSDLTGIDLEIEGEGYVTSQDSPAQTTIESGDPVKVTMSDPSGESSQTSHESNIPDHPDQAWDESTFAE

SEQ ID NO: 5221 - DNA, 528 bp, Alloiococcus otitidis
  CDS (34)..(525)
accaaaaagaccattaagagcaaagcgatatctttggttcccgtcccgattaaaaaggccaaagcgatggtcaccgtaaccgataagataaaggctaggccacccatggttggggttccactcttactttggtgccaacttgggccaatttcccgggtggtttggcctaattgtttacgcctaaagtatttaatcactaagggcataaggataagggacaggaccaggccgcttaagaagggccagatgagttgtaaattaatcataaatatctcctattgcgataataatgggtctatggctaacggccatggacccatatattttgatgtctttattgtgtttaaaagcacatccaagattattttagcgataatccccctagcaagcaatcactttaataaagattttaaaattgctattcagcaaaagttgactcatcccaagcctggtctggatggtcaggaatgttggactcgtgacttgtttgactggattcacctgatggatcagacatggtcactttaa

SEQ ID NO: 5222 - protein, 164 aa, Alloiococcus otitidis
MVPVPIKKAKAMVTVTDKIKARPPMVGVPLLLWCQLGPISRVVWPNCLRLKYLITKGIRIRDRTRPLKKGQMSCKLIINISYCDNNGSMANGHGPIYFDVFIVFKSTSKIILAIIPLASNHFNKDFKIAIQQKLTHPKPGLDGQECWTRDLFDWIHLMDQTWSL

SEQ ID NO: 5223 - DNA, 405 bp, Alloiococcus otitidis
  CDS (115)..(402)
ggagtgagtctgatgcctacaaacgataacttagccagacaatatcaagagagctattcaaaactccctgaccggcctaagattgatgttaaacagggtcatgaagcttcagacatgaaacatagcctagttagacctggcttaaccaaattggaaaagctagtcatgacccttttcgcagtggcctttatgggcttgagcctcttcagcatttccatgacctcaagcttgactgctgtcagtcaagaagttcaagacttgcaacaagaaatcgaagaaacttctgaaatgaatacaaatttagaacaaaatatccaagaattgtcacgctacgaccgcgtttatggccaagctcgtgaccagggtttagaaaaccaaaatgaccgagtaaggaaggttgaataa

SEQ ID NO: 5224 - protein, 96 aa, Alloiococcus otitidis
MKHSLVRPGLTKLEKLVMTLFAVAFMGLSLFSISMTSSLTAVSQEVQDLQQEIEETSEMNTNLEQNIQELSRYDRVYGQARDQGLENQNDRVRKVE

SEQ ID NO: 5225 - DNA, 405 bp, Alloiococcus otitidis; identical to SEQ ID NO: 5223
  CDS (13)..(402)

SEQ ID NO: 5226 - protein, 130 aa, Alloiococcus otitidis
MPTNDNLARQYQESYSKLPDRPKIDVKQGHEASDMKHSLVRPGLTKLEKLVMTLFAVAFMGLSLFSISMTSSLTAVSQEVQDLQQEIEETSEMNTNLEQNIQELSRYDRVYGQARDQGLENQNDRVRKVE

SEQ ID NO: 5227 - DNA, 405 bp, Alloiococcus otitidis; identical to SEQ ID NO: 5223
  CDS (4)..(402)

SEQ ID NO: 5228 - protein, 133 aa, Alloiococcus otitidis
MSLMPTNDNLARQYQESYSKLPDRPKIDVKQGHEASDMKHSLVRPGLTKLEKLVMTLFAVAFMGLSLFSISMTSSLTAVSQEVQDLQQEIEETSEMNTNLEQNIQELSRYDRVYGQARDQGLENQNDRVRKVE

SEQ ID NO: 5229 - DNA, 969 bp, Alloiococcus otitidis
  CDS (97)..(966)
ggagggaagcaagtggcgacctttgaccatgaaacagtacttttagaagaatcggttgaatccttaaagattaaagaagacggtctttatgtggatatgacccttggtggaggtggtcacaccagtttaatcttggaccagttaggtgaccaaggtaggctttttgctttcgaccaggaccaagaagccattagtcatgctcaagacagtttccaagaggcaattgcatcaggcaagttaagcttggtacatgctaactttcgcaatgtcaaacaggaattgtcaaacattgctgtcaaaggggtggacgggatcttgtatgacctaggagtctcctcccctcaattggaccaagcagcaagaggctttagctaccaccaggatgcccacttagacatgcggatggacaagagtcagcccctgtcagcttataccattgtcaatgaatggccttataaggacttggttgctatcttgtttaaatacggggaagaaaaattttctaagcaaattgctcgtaaaattgaagctagacgcaaagaccaacccattgaaaggacaaaagaactggtggaaattatcaaggatgccataccagcacctgctcgcagaaagggaggccaccctgccaagcggaccttccaagccatccggattgccgtcaacgatgaattaggggccttggaagattcactagaccaggccattgacctactaaacttaaagggacggctcagtgtgatttctttccattctttagaagaccggatcgtcaagcaaaaattacggcaatattcaagcccgcccgatatacctaggggccttcctatcctacctgattttgcagaaccaattttgaagttagtcaacaagaagcctatcagtcctagccaaggagaaatagagaccaacaatcggtcgcggtcggccaagctgagggttgcagagaaacaacgaattgaggagtga

SEQ ID NO: 5230 - protein, 290 aa, Alloiococcus otitidis
MTLGGGGHTSLILDQLGDQGRLFAFDQDQEAISHAQDSFQEAIASGKLSLVHANFRNVKQELSNIAVKGVDGILYDLGVSSPQLDQAARGFSYHQDAHLDMRMDKSQPLSAYTIVNEWPYKDLVAILFKYGEEKFSKQIARKIEARRKDQPIERTKELVEIIKDAIPAPARRKGGHPAKRTFQAIRIAVNDELGALEDSLDQAIDLLNLKGRLSVISFHSLEDRIVKQKLRQYSSPPDIPRGLPILPDFAEPILKLVNKKPISPSQGEIETNNRSRSAKLRVAEKQRIEE

SEQ ID NO: 5231 - DNA, 969 bp, Alloiococcus otitidis; identical to SEQ ID NO: 5229
  CDS (13)..(966)

SEQ ID NO: 5232 - protein, 318 aa, Alloiococcus otitidis
MATFDHETVLLEESVESLKIKEDGLYVDMTLGGGGHTSLILDQLGDQGRLFAFDQDQEAISHAQDSFQEAIASGKLSLVHANFRNVKQELSNIAVKGVDGILYDLGVSSPQLDQAARGFSYHQDAHLDMRMDKSQPLSAYTIVNEWPYKDLVAILFKYGEEKFSKQIARKIEARRKDQPIERTKELVEIIKDAIPAPARRKGGHPAKRTFQAIRIAVNDELGALEDSLDQAIDLLNLKGRLSVISFHSLEDRIVKQKLRQYSSPPDIPRGLPILPDFAEPILKLVNKKPISPSQGEIETNNRSRSAKLRVAEKQRIEE

SEQ ID NO: 5233 - DNA, 456 bp, Alloiococcus otitidis
  CDS (31)..(453)
ttaaggggagggaatggtgacaaagtgctaatgggagaattccagcataatattgatgcaaaaggccggctgattgtgccgtctaaatttcgtgaaagcttgggcgaaagcttcattgtcacccgcggtttggatggctgtttatttggctatcctaaagaagcttggtcagaattagaagaaaaactaaaacaactccctttagctaagaaggaatcccggcaatttacccggtttttttattcaggagccgtagaatgtagcttggataaacaggggcggatcaacctacccaagaccttgattgattatgctaagcttgaaaaatcctgctacttaattggcgtctctgaacggatcgagatttggagtgaagaccgctggaaagaagttagtgcctcagccggagcatcttttgaagaacttgctgaagatatgattgattttggcttttaa

SEQ ID NO: 5234 - protein, 141 aa, Alloiococcus otitidis
MGEFQHNIDAKGRLIVPSKFRESLGESFIVTRGLDGCLFGYPKEAWSELEEKLKQLPLAKKESRQFTRFFYSGAVECSLDKQGRINLPKTLIDYAKLEKSCYLIGVSERIEIWSEDRWKEVSASAGASFEELAEDMIDFGF

SEQ ID NO: 5235 - DNA, 456 bp, Alloiococcus otitidis; identical to SEQ ID NO: 5233
  CDS (25)..(453)

SEQ ID NO: 5236 - protein, 143 aa, Alloiococcus otitidis
MLMGEFQHNIDAKGRLIVPSKFRESLGESFIVTRGLDGCLFGYPKEAWSELEEKLKQLPLAKKESRQFTRFFYSGAVECSLDKQGRINLPKTLIDYAKLEKSCYLIGVSERIEIWSEDRWKEVSASAGASFEELAEDMIDFGF

SEQ ID NO: 5237 - DNA, 390 bp, Alloiococcus otitidis
  CDS (13)..(387)
gaggaagagtttatgaatactgtagcctattttatagccttattgttactctttattattccctttgtggttatttactttaaccaatatatcaaccggcagtttaaacaagttaaccttcccattaaaacaccggatattttgactatttatcaaatttttgccattcactggtttagccagatcgcctttggtcggacttggctagtttttttggccctccttttagccattgctggtttaggcatggtggtctattacttgtctaaggatatttctatttactatggtcgtttcttccgaatttggtggcggctaacttttttggtcacatttgtcctttaccttatcagtggtttagccgccttgtaccaagttttggcaggataa

SEQ ID NO: 5238 - protein, 125 aa, Alloiococcus otitidis
MNTVAYFIALLLLFIIPFVVIYFNQYINRQFKQVNLPIKTPDILTIYQIFAIHWFSQIAFGRTWLVFLALLLAIAGLGMVVYYLSKDISIYYGRFFRIWWRLTFLVTFVLYLISGLAALYQVLAG

SEQ ID NO: 5239 - DNA, 591 bp, Alloiococcus otitidis
  CDS (34)..(588)
aaccttatcagtcaaagacatagaggtgataaaatgaaaattaaatgggcattgaacgaattgcggaagcaagacaatgaaccaacccggatccagggtcaaattgacctagagtcaagtttgaccaagcggagcaagtccattcttgcagcaggacccgttaccatagatggttggattataacagaaggcgaggatgcctttattgttgattgcaatttaagggtagctttaaccgtcccatcaactcggtctttgaccccggttgatattgattgcagggcaagattgcaggagacctacctggctcctgggcgagaggctagccaagaagaattggaccaagatgaattggttatccagctggacagccaagagcttgacttgcaaaaaccgatcgaggatagcattatcttagctattccgaccaaggtattaactgaggaagaagaggagaaagggatattcccaaaaggtgatgactgggaggtcatgactgaagaaggcttggaacaacaacggaaagaccaggcccaagaagattccccctttgcagctttaaaagacctgtttcctgatgaagacgaatga

SEQ ID NO: 5240 - protein, 185 aa, Alloiococcus otitidis
MKIKWALNELRKQDNEPTRIQGQIDLESSLTKRSKSILAAGPVTIDGWIITEGEDAFIVDCNLRVALTVPSTRSLTPVDIDCRARLQETYLAPGREASQEELDQDELVIQLDSQELDLQKPIEDSIILAIPTKVLTEEEEEKGIFPKGDDWEVMTEEGLEQQRKDQAQEDSPFAALKDLFPDEDE

SEQ ID NO: 5241 - DNA, 1203 bp, Alloiococcus otitidis
  CDS (10)..(1200)
gtgaaagccttgggtattatagctgaatacaatcctttccacaatggccacctttaccaactaaaccgggctagggaagttagacaggccgaccttgttgtggtttgtcagtctggcaacttcttgcaaaggggggagccggccatttacgacaagtggcatagggcaaaatgggctgtccagtccggggctgaccttgtcctagaactaccccttcccttttccatccaatcagctgactactttgcccaggctggtgtaaggcttttagaccagcttggtgtcgaccagctcgcttttggggtagagtctggccagctggaagactttcaagggggggctaggcacttggtggaccatgctgaggactttgcatccttcttaaaccagtccccaagggaaaagtcctaccatgaacttattatggactggctggcttccagtgagttaactcggctacccgacttaagccaacccaataatattttggcttttacatatataaaggcggcctaccaagcaggacttgattttcgttttttccccattaaacgtatcggggccaactaccatgatgaccaggcccaaccaggtgccaaaatcgcttcggcaacagcaatccgcaaaaaaatttaccaaggtcaagctgtccagaactatcttcccaaacctgtcttgcaagacctctttcgtctgcccccagtcaagccccaagatttctggccttttatccaatataaagtctggaatatgacggaagcggagatggataaaatctatgacatgaagccaggactaagccaacgcttgaaaaaagcagtcttacaagctaaaagcctgaaagactttttcagtttaaccactagtcgccagttgagtcacaaccggatcaagcgcctagctctctattgcctcctagacttataccaagaccaagtggaagaattaaaccaaattggtccaagttatatccgcccccttgcttttaactctctaggtcaggcctatcttggcaagattaagtcgtctttgaccttgccccttgtaactaagctgagccaagatttggctgataaattagccttggacatcaaggcgggtgaattatatcggctagctaggctgggggacttgcccaagcaagacttcacacgaaaaccctatatgagtattgacaaatatggtgatagaaagtatacttaa

SEQ ID NO: 5242 - protein, 397 aa, Alloiococcus otitidis
MGIIAEYNPFHNGHLYQLNRAREVRQADLVVVCQSGNFLQRGEPAIYDKWHRAKWAVQSGADLVLELPLPFSIQSADYFAQAGVRLLDQLGVDQLAFGVESGQLEDFQGGARHLVDHAEDFASFLNQSPREKSYHELIMDWLASSELTRLPDLSQPNNILAFTYIKAAYQAGLDFRFFPIKRIGANYHDDQAQPGAKIASATAIRKKIYQGQAVQNYLPKPVLQDLFRLPPVKPQDFWPFIQYKVWNMTEAEMDKIYDMKPGLSQRLKKAVLQAKSLKDFFSLTTSRQLSHNRIKRLALYCLLDLYQDQVEELNQIGPSYIRPLAFNSLGQAYLGKIKSSLTLPLVTKLSQDLADKLALDIKAGELYRLARLGDLPKQDFTRKPYMSIDKYGDRKYT

SEQ ID NO: 5243 - DNA, 1203 bp, Alloiococcus otitidis; identical to SEQ ID NO: 5241
  CDS (1)..(1200)

SEQ ID NO: 5244 - protein, 400 aa, Alloiococcus otitidis
MKALGIIAEYNPFHNGHLYQLNRAREVRQADLVVVCQSGNFLQRGEPAIYDKWHRAKWAVQSGADLVLELPLPFSIQSADYFAQAGVRLLDQLGVDQLAFGVESGQLEDFQGGARHLVDHAEDFASFLNQSPREKSYHELIMDWLASSELTRLPDLSQPNNILAFTYIKAAYQAGLDFRFFPIKRIGANYHDDQAQPGAKIASATAIRKKIYQGQAVQNYLPKPVLQDLFRLPPVKPQDFWPFIQYKVWNMTEAEMDKIYDMKPGLSQRLKKAVLQAKSLKDFFSLTTSRQLSHNRIKRLALYCLLDLYQDQVEELNQIGPSYIRPLAFNSLGQAYLGKIKSSLTLPLVTKLSQDLADKLALDIKAGELYRLARLGDLPKQDFTRKPYMSIDKYGDRKYT

SEQ ID NO: 5245 - DNA, 723 bp, Alloiococcus otitidis
  CDS (4)..(720)
ctaatggttgactaccaagcttttgcccagctttacgatgatttaatgaaccaaaccctgtatgatcagtgggcggattgggtccaaaaccgcctccccaaaggccagtctatcttggagttgggctgtgggaccggccgtttagccaataaattgcttcaaaattataaagtgaccggcttggaccggtcagtagacatgttgaccttggctagagaacagcaaaccaagccttacccccttatccaagctgatatgaccaaactagcggatttacccgtctatgatcatattattgcttttaatgatacgctatgttatttggaaaatccccaagttcttttgtcttgttttcaatcagtttacaagcacttggcccttggtggtcaatttctctttgatgttcactccattaagcagatggacgattttaatggtttttcctaccatggggaaagcgaccaaggtttgctggtatgggattcttatccaggcgaccagccctattcagtggaacatgacctctcaatttttttagtccaagctgatggtagctaccaccgctttgatgaaaggcattttgagagaacctatgaagcaagcttttatgagcaattattgcatcaagccggttttcgctcggtccagatgaccagtgactttgaagagaattttaacccggaaggcaagcggtggtttttccaagctaagaaaatagtatga

SEQ ID NO: 5246 - protein, 239 aa, Alloiococcus otitidis
MVDYQAFAQLYDDLMNQTLYDQWADWVQNRLPKGQSILELGCGTGRLANKLLQNYKVTGLDRSVDMLTLAREQQTKPYPLIQADMTKLADLPVYDHIIAFNDTLCYLENPQVLLSCFQSVYKHLALGGQFLFDVHSIKQMDDFNGFSYHGESDQGLLVWDSYPGDQPYSVEHDLSIFLVQADGSYHRFDERHFERTYEASFYEQLLHQAGFRSVQMTSDFEENFNPEGKRWFFQAKKIV

SEQ ID NO: 5247 - DNA, 372 bp, Alloiococcus otitidis
  CDS (4)..(369)
ggagtggataggttgaatcaagataaggaaaatttactagcagtggtagttaaggctttagatgacaagcgagccaagaacattgtggctttagatatggccggtttatcgattataactgattacaatgttgtcacacatgggtccagttctcggcagatcaatgctctagcccaggctgtcttggatgcagccagtcaggctggatttgaggtcaaccggattgaaggtaaggggtcaaccagttgggtcttaattgacttaggcgaagttgtggtccatgtctttagtgaagaggaaagagatttttaccaattggaaagcttatggacggaagccccaagtgttgatattgcagagtgggttaactaa

SEQ ID NO: 5248 - protein, 122 aa, Alloiococcus otitidis
MDRLNQDKENLLAVVVKALDDKRAKNIVALDMAGLSIITDYNVVTHGSSSRQINALAQAVLDAASQAGFEVNRIEGKGSTSWVLIDLGEVVVHVFSEEERDFYQLESLWTEAPSVDIAEWVN

SEQ ID NO: 5249 - DNA, 630 bp, Alloiococcus otitidis
  CDS (49)..(627)
gagattatattgaagacaatggcttatataagggtgaagaataaggaaatgaattacacaaaaaactacattgaaattagtagaggagacttaatcaagcgcatagaagataaactgagtcaggaccggttcaaccatattctgcgagttgaggcaacggctttggaattagccgaccgcttccaggccgactcggaaaaagttagcattgcggccttgcttcacgattatgccaaggaagtcaatatggatgaactgaggaatattgtcataaatgaaaacctggacttggagttgctcgattacggcaatagcattttacatggccctgttggttcagtttgtgcttatgatgaatttggcgtgaccgacaaggaaattttaaatgccatttactaccataccattggtcgtaaaaacatgtccctggttgaaaaagtcatctttgtagctgattatacagaacctcaccgtgacttctcccaggctgataaggcgagagacttggctcaagatgacctagaccaagcggtaacctatattgtcaaggaaaccctgctcaagttaatcaaagataacaagttagtttacccaggtgcattggatacttataacagcttaattgcataa

SEQ ID NO: 5250 - protein, 193 aa, Alloiococcus otitidis
MNYTKNYIEISRGDLIKRIEDKLSQDRFNHILRVEATALELADRFQADSEKVSIAALLHDYAKEVNMDELRNIVINENLDLELLDYGNSILHGPVGSVCAYDEFGVTDKEILNAIYYHTIGRKNMSLVEKVIFVADYTEPHRDFSQADKARDLAQDDLDQAVTYIVKETLLKLIKDNKLVYPGALDTYNSLIA

SEQ ID NO: 5251 - DNA, 630 bp, Alloiococcus otitidis; identical to SEQ ID NO: 5249
  CDS (19)..(627)

SEQ ID NO: 5252 - protein, 203 aa, Alloiococcus otitidis
MAYIRVKNKEMNYTKNYIEISRGDLIKRIEDKLSQDRFNHILRVEATALELADRFQADSEKVSIAALLHDYAKEVNMDELRNIVINENLDLELLDYGNSILHGPVGSVCAYDEFGVTDKEILNAIYYHTIGRKNMSLVEKVIFVADYTEPHRDFSQADKARDLAQDDLDQAVTYIVKETLLKLIKDNKLVYPGALDTYNSLIA

SEQ ID NO: 5253 - DNA, 630 bp, Alloiococcus otitidis; identical to SEQ ID NO: 5249
  CDS (10)..(627)

SEQ ID NO: 5254 - protein, 206 aa, Alloiococcus otitidis
MKTMAYIRVKNKEMNYTKNYIEISRGDLIKRIEDKLSQDRFNHILRVEATALELADRFQADSEKVSIAALLHDYAKEVNMDELRNIVINENLDLELLDYGNSILHGPVGSVCAYDEFGVTDKEILNAIYYHTIGRKNMSLVEKVIFVADYTEPHRDFSQADKARDLAQDDLDQAVTYIVKETLLKLIKDNKLVYPGALDTYNSLIA

SEQ ID NO: 5255 - DNA, 651 bp, Alloiococcus otitidis
  CDS (7)..(648)
actagtatgaagcaaaaaactcaagcgacagcggtcaaccagacccaaacagaggcagaagaaagacaagaaacccgtcggaaaattggcctcatgggggggacctttaatccgccccatctgggtcatttactggtagctgaacaagtttatgaggccttggacttggataatattcactttatgcccactgcaaagccgggccatgccgctggtaaggaaaccatagatgcctcttaccgggttgatatggtggattatgccatcgaagataacccccacttttctcttaacttgactgaagtgaaccggggagggacaacttacaccatcgataccattaaagaattgaaagaggctagcccgaatacagattattacttcattattggtgaggattcagttatggatttggcccagtggaagaatattgaacaattactggatttagttcaatttgttggtgtgaagcgaccaggctaccaagctgatgtggactttcccattatttgggtggatacgccagaactagatattagttcaagtgacatcaggcaaagggtggcagaagggcaatccattaaatatttgaccccagatagggtaagagattatattgaagacaatggcttatataagggtgaagaataa

SEQ ID NO: 5256 - protein, 214 aa, Alloiococcus otitidis
MKQKTQATAVNQTQTEAEERQETRRKIGLMGGTFNPPHLGHLLVAEQVYEALDLDNIHFMPTAKPGHAAGKETIDASYRVDMVDYAIEDNPHFSLNLTEVNRGGTTYTIDTIKELKEASPNTDYYFIIGEDSVMDLAQWKNIEQLLDLVQFVGVKRPGYQADVDFPIIWVDTPELDISSSDIRQRVAEGQSIKYLTPDRVRDYIEDNGLYKGEE

SEQ ID NO: 5257 - DNA, 315 bp, Alloiococcus otitidis
  CDS (1)..(312)
ttgtcattaagtaaaaaacaagttaagtttttaaagaaaaaatctcacacggttgatcccatttttcaaattggcaagcaggggataaccgatcaaattttggctgaactgcatgacgccattgaaaaaagagaactgattaaagtctctgtcctgcaaaattctgcaatgaccaacaaagaaattgcaacctttattgaagacaattctgatatcaaagtcattgattctatcgggagggttttagtcttgtacaagtcctcttcctatgagaacaaccgcttgatttcagacaaggttcgtggagtagactag

SEQ ID NO: 5258 - protein, 104 aa, Alloiococcus otitidis
MSLSKKQVKFLKKKSHTVDPIFQIGKQGITDQILAELHDAIEKRELIKVSVLQNSAMTNKEIATFIEDNSDIKVIDSIGRVLVLYKSSSYENNRLISDKVRGVD

SEQ ID NO: 5259 - DNA, 1161 bp, Alloiococcus otitidis
  CDS (247)..(1158)
gatgcgaagtttagtatgatgaagaaaggccaagatacagtgaagcaagaaaacccagatgaagtaatttactgcattggctgtggggccccactccaaagccaagatccaaaccaacctggttacctccctcaatcagccctagaagggcggtctgaggatgacctctattgtaagcggtgttttagactgaggcattataatgaactagcggatgttcaagtgacctctgacgattttttgaacatgcttggggagatttcccaagaagaggccctagtcgttaatgtggttgacattttagatgttaacggaagctttgtgcctggcattggtcgcttgaccggtaacaaccccttgatcattgttgggaataaatttgacctcttacctaagtcacttaaacggggaaagctaagacaatggttagaagaagttagctatgacatgggggttaagcccctagcagttgatctgatttctgcagtccggcaaggatcagtagctcacttgctcgacttgattaatgcgtaccgtggggaccgggatgtctatatagtagggaccaccaatgttggcaagtccaccttaatcaaccagattatcaacttggccagccaagaagaagatgctgtcacgacctcctacttcccaggaaccactttaggaaaaattgaaattcctcttgatgatggtcataaactggtggatacaccaggaatcttccagccaggccaggtggtccaccaactcaatcctcaagaagttaaggcggtcattccccgcaaggagttgaaaccccggacctaccaactgaacccaggccagtccctctttattggtggcttaggccggtttgactatgtccagggtccaggcaaggcttcttttgtggtttatgcagctccttctctgtccatccaccggacaaaaagggaaagagctgacgacttataccaaagccagttaggaaaagacttgaccccaccatttgacagcaaggataaaaaaactctaaccaagcgaactttcaaggtcgaccaagcatctgatttggtctactctggtctgggctgggttaagatcaatgcttcaggtgttgaagtagaagtccatattatccaaggagccgatatttttatccgtaaacccatgatctaa

SEQ ID NO: 5260 - protein, 304 aa, Alloiococcus otitidis
MLGEISQEEALVVNVVDILDVNGSFVPGIGRLTGNNPLIIVGNKFDLLPKSLKRGKLRQWLEEVSYDMGVKPLAVDLISAVRQGSVAHLLDLINAYRGDRDVYIVGTTNVGKSTLINQIINLASQEEDAVTTSYFPGTTLGKIEIPLDDGHKLVDTPGIFQPGQVVHQLNPQEVKAVIPRKELKPRTYQLNPGQSLFIGGLGRFDYVQGPGKASFVVYAAPSLSIHRTKRERADDLYQSQLGKDLTPPFDSKDKKTLTKRTFKVDQASDLVYSGLGWVKINASGVEVEVHIIQGADIFIRKPMI

SEQ ID NO: 5261 - DNA, 1161 bp, Alloiococcus otitidis; identical to SEQ ID NO: 5259
  CDS (16)..(1158)

SEQ ID NO: 5262 - protein, 381 aa, Alloiococcus otitidis
MMKKGQDTVKQENPDEVIYCIGCGAPLQSQDPNQPGYLPQSALEGRSEDDLYCKRCFRLRHYNELADVQVTSDDFLNMLGEISQEEALVVNVVDILDVNGSFVPGIGRLTGNNPLIIVGNKFDLLPKSLKRGKLRQWLEEVSYDMGVKPLAVDLISAVRQGSVAHLLDLINAYRGDRDVYIVGTTNVGKSTLINQIINLASQEEDAVTTSYFPGTTLGKIEIPLDDGHKLVDTPGIFQPGQVVHQLNPQEVKAVIPRKELKPRTYQLNPGQSLFIGGLGRFDYVQGPGKASFVVYAAPSLSIHRTKRERADDLYQSQLGKDLTPPFDSKDKKTLTKRTFKVDQASDLVYSGLGWVKINASGVEVEVHIIQGADIFIRKPMI

SEQ ID NO: 5263 - DNA, 609 bp, Alloiococcus otitidis
  CDS (67)..(606)
ctgttgaaatttttgaacgtttgcagcctaggcattttaaaaagaacgagtgaaaaaggaccagctatgttaagtctatttaagcctacttatatggtagaatcagtttataatattgaaccctctgagtttattaaacggggtaagaaggtggtcttcgctgacttggataataccttgattgcttggaaccaccccaaggcaactcaggagttaattaactggctggaccagctcaatgattttggcatccaggttatagtcttatcaaataataataaagaccgggtggaaaaagcagtggcccacactggcgtaacccacattccatcagcctttaaaccttgtaaaaagggttttgagaaggccttttccttggtcaaccagccaaaagaaaatattattatggttggtgaccaggtcattactgatattgttggagctaatcgatttaagatagacagtgtcttagtcaaacccatcctggcttcagacgcttggaataccaagttcaaccggttaattgaatacaatatcctcaagctagtagtcaagtataaccctgatatggaatggaaagattctttagatgaccatttgaagaaataa

SEQ ID NO: 5264 - protein, 180 aa, Alloiococcus otitidis
MLSLFKPTYMVESVYNIEPSEFIKRGKKVVFADLDNTLIAWNHPKATQELINWLDQLNDFGIQVIVLSNNNKDRVEKAVAHTGVTHIPSAFKPCKKGFEKAFSLVNQPKENIIMVGDQVITDIVGANRFKIDSVLVKPILASDAWNTKFNRLIEYNILKLVVKYNPDMEWKDSLDDHLKK

SEQ ID NO: 5265 - DNA, 609 bp, Alloiococcus otitidis; identical to SEQ ID NO: 5263
  CDS (4)..(606)

SEQ ID NO: 5266 - protein, 201 aa, Alloiococcus otitidis
MKFLNVCSLGILKRTSEKGPAMLSLFKPTYMVESVYNIEPSEFIKRGKKVVFADLDNTLIAWNHPKATQELINWLDQLNDFGIQVIVLSNNNKDRVEKAVAHTGVTHIPSAFKPCKKGFEKAFSLVNQPKENIIMVGDQVITDIVGANRFKIDSVLVKPILASDAWNTKFNRLIEYNILKLVVKYNPDMEWKDSLDDHLKK

SEQ ID NO: 5267 - DNA, 471 bp, Alloiococcus otitidis
  CDS (196)..(468)
attacttcatctgggttttcttgcttcactgtatcttggcctttcttcatcatactaaacttcgcatcttatttcttcaaatggtcatctaaagaatctttccattccatatcagggttatacttgactactagcttgaggatattgtattcaattaaccggttgaacttggtattccaagcgtctgaagccaggatgggtttgactaagacactgtctatcttaaatcgattagctccaacaatatcagtaatgacctggtcaccaaccataataatattttcttttggctggttgaccaaggaaaaggccttctcaaaaccctttttacaaggtttaaaggctgatggaatgtgggttacgccagtgtgggccactgctttttccacccggtctttattattatttgataagactataacctggatgccaaaatcattgagctggtccagccagttaattaactcctga

SEQ ID NO: 5268 - protein, 91 aa, Alloiococcus otitidis
MGLTKTLSILNRLAPTISVMTWSPTIIIFSFGWLTKEKAFSKPFLQGLKADGMWVTPVWATAFSTRSLLLFDKTITWMPKSLSWSSQLINS

SEQ ID NO: 5269 - DNA, 300 bp, Alloiococcus otitidis
  CDS (37)..(297)
cttagtgtgtatactgtagaagggagttttatttgcatggtttattcttcagacttggtgtcaatagttaaacggttgaatgccatgcgtgaagataaaacaagcgtcagacaagttagacactttgatgttgacggtcaagagcggtgtgtggttttgtttgatggctttacagggaattttaaactgatcgaccccctgtctgaaaaaaataatgtatatgaatttgacgatattgaccacctagctgttgaaatttttgaacgtttgcagcctaggcattttaaaaagaacgagtga

SEQ ID NO: 5270 - protein, 87 aa, Alloiococcus otitidis
MVYSSDLVSIVKRLNAMREDKTSVRQVRHFDVDGQERCVVLFDGFTGNFKLIDPLSEKNNVYEFDDIDHLAVEIFERLQPRHFKKNE

SEQ ID NO: 5271 - DNA, 300 bp, Alloiococcus otitidis; identical to SEQ ID NO: 5269
  CDS (7)..(297)

SEQ ID NO: 5272 - protein, 97 aa, Alloiococcus otitidis
MYTVEGSFICMVYSSDLVSIVKRLNAMREDKTSVRQVRHFDVDGQERCVVLFDGFTGNFKLIDPLSEKNNVYEFDDIDHLAVEIFERLQPRHFKKNE

SEQ ID NO: 5273 - DNA, 1830 bp, Alloiococcus otitidis
  CDS (109)..(1827)
gtgctggtcaaggctcagatgtcaccattagtgccgacgggtcagatgaaaaagaagcaattgaagcaatcgaagaaactatcaaaaatgagggaatggctgaataaaatgggaaacaaattaacaggaattgctgctagtgatggttttgcccacgccaaggcttacccattagttcaacctgatttaactgtttcaaaacaatcagtagaagatacagaagctgaagttgaaagatttaaagcagcaatcgaccaagcgacggaagaattgcagacaattcggcaaaaggcggctgaaagtgtgggcgaagaagaggcccaagtctttgatgcccacatcatggttctggctgatccggacttaagtgaccagaccaccactaaaattaaagaagaccaggtcaatgcggcttatgcctttgaagcagtggcagacaattttatcactatttttgaaggcatggaagacaacccctacatgcaagagcgggcttctgatattaaggatatcaaaaaacgtgtgattgcccacttgctaagtgttgacttacccgacccgtcagctattgatgaagaagtagtggtgattgctgaagatttaaccccgagtgacacggctcagttaaacaaaaaatacgtcaaggcttttgtcactgatgtaggggggcggacatctcactcagccatcatggctcggtcactggaaatccctgctgtggtggggacaggtcaaatcactagcacggtcaaaaaagaccaagaactagtagtcgatggggtgaccggtgaagtcatcatcgacccatctgaccaagagattgaagcaaatgaggaaaaagctagtgaatacgaaagcatgaaggctgaatggaacaagctcaaagatgaacccagcatcagtaaagatggagtccaagttgaactggcagctaatattgggacccccaaagaccttgaaggggtcagcgataatggggcagagggcataggcctttatcgtactgaatttctctacatggattcccctgaattaccaagtgaggaagaccagttccaagcctacaaggaagtcttagaaggggtcgacggcaaaccagttgtggtccggaccatggatattggtggcgataaggaattaccttaccttgatctgccagacgaaatgaaccccttcttgggctaccgggccttacgaattagtttagaccgggatgaaatctttagaacccaaattcgagccttgctccgggcttcaacttacggccagttgcggatcatgttcccaatggtgtccaacttggatgaattgcgggcagctaaggctatcgtccaagaagaaaaagacaagctagaagaccaaggtcaaacgatctctgattccttgcaaattgggattatgattgaaatcccagcagctgctatgttggccgaccagtttgctaaggaagtcgacttcttctcagttgggaccaatgacttgatccaatataccatggcagctgaccgtttgaatgagcgggtttcctacctctaccaaccgtataacccttctatcctacgcttgattcataatgtaatccaagcggctcacaaagaaggcaaatgggctggcatgtgtggggaaatggctggagaccagttggcagttcccctcctcttaggaatgggcttggatgaattttccatgtctgctaccagtatcttgaagactcggtccttgatctcccggctagactcaaaagaaatggcagaattagctaacaaggctttgactgagtgcacaacccaagatgaagttgttaaactagtcgaagaatatacaaaataa

SEQ ID NO: 5274 - protein, 573 aa, Alloiococcus otitidis
MGNKLTGIAASDGFAHAKAYPLVQPDLTVSKQSVEDTEAEVERFKAAIDQATEELQTIRQKAAESVGEEEAQVFDAHIMVLADPDLSDQTTTKIKEDQVNAAYAFEAVADNFITIFEGMEDNPYMQERASDIKDIKKRVIAHLLSVDLPDPSAIDEEVVVIAEDLTPSDTAQLNKKYVKAFVTDVGGRTSHSAIMARSLEIPAVVGTGQITSTVKKDQELVVDGVTGEVIIDPSDQEIEANEEKASEYESMKAEWNKLKDEPSISKDGVQVELAANIGTPKDLEGVSDNGAEGIGLYRTEFLYMDSPELPSEEDQFQAYKEVLEGVDGKPVVVRTMDIGGDKELPYLDLPDEMNPFLGYRALRISLDRDEIFRTQIRALLRASTYGQLRIMFPMVSNLDELRAAKAIVQEEKDKLEDQGQTISDSLQIGIMIEIPAAAMLADQFAKEVDFFSVGTNDLIQYTMAADRLNERVSYLYQPYNPSILRLIHNVIQAAHKEGKWAGMCGEMAGDQLAVPLLLGMGLDEFSMSATSILKTRSLISRLDSKEMAELANKALTECTTQDEVVKLVEEYTK

SEQ ID NO: 5275 - DNA, 1830 bp, Alloiococcus otitidis; identical to SEQ ID NO: 5273
  CDS (88)..(1827)

SEQ ID NO: 5276 - protein, 580 aa, Alloiococcus otitidis
MREWLNKMGNKLTGIAASDGFAHAKAYPLVQPDLTVSKQSVEDTEAEVERFKAAIDQATEELQTIRQKAAESVGEEEAQVFDAHIMVLADPDLSDQTTTKIKEDQVNAAYAFEAVADNFITIFEGMEDNPYMQERASDIKDIKKRVIAHLLSVDLPDPSAIDEEVVVIAEDLTPSDTAQLNKKYVKAFVTDVGGRTSHSAIMARSLEIPAVVGTGQITSTVKKDQELVVDGVTGEVIIDPSDQEIEANEEKASEYESMKAEWNKLKDEPSISKDGVQVELAANIGTPKDLEGVSDNGAEGIGLYRTEFLYMDSPELPSEEDQFQAYKEVLEGVDGKPVVVRTMDIGGDKELPYLDLPDEMNPFLGYRALRISLDRDEIFRTQIRALLRASTYGQLRIMFPMVSNLDELRAAKAIVQEEKDKLEDQGQTISDSLQIGIMIEIPAAAMLADQFAKEVDFFSVGTNDLIQYTMAADRLNERVSYLYQPYNPSILRLIHNVIQAAHKEGKWAGMCGEMAGDQLAVPLLLGMGLDEFSMSATSILKTRSLISRLDSKEMAELANKALTECTTQDEVVKLVEEYTK

SEQ ID NO: 5277 - DNA, 1830 bp, Alloiococcus otitidis; identical to SEQ ID NO: 5273
  CDS (19)..(1827)

SEQ ID NO: 5278 - protein, 603 aa, Alloiococcus otitidis
MSPLVPTGQMKKKQLKQSKKLSKMREWLNKMGNKLTGIAASDGFAHAKAYPLVQPDLTVSKQSVEDTEAEVERFKAAIDQATEELQTIRQKAAESVGEEEAQVFDAHIMVLADPDLSDQTTTKIKEDQVNAAYAFEAVADNFITIFEGMEDNPYMQERASDIKDIKKRVIAHLLSVDLPDPSAIDEEVVVIAEDLTPSDTAQLNKKYVKAFVTDVGGRTSHSAIMARSLEIPAVVGTGQITSTVKKDQELVVDGVTGEVIIDPSDQEIEANEEKASEYESMKAEWNKLKDEPSISKDGVQVELAANIGTPKDLEGVSDNGAEGIGLYRTEFLYMDSPELPSEEDQFQAYKEVLEGVDGKPVVVRTMDIGGDKELPYLDLPDEMNPFLGYRALRISLDRDEIFRTQIRALLRASTYGQLRIMFPMVSNLDELRAAKAIVQEEKDKLEDQGQTISDSLQIGIMIEIPAAAMLADQFAKEVDFFSVGTNDLIQYTMAADRLNERVSYLYQPYNPSILRLIHNVIQAAHKEGKWAGMCGEMAGDQLAVPLLLGMGLDEFSMSATSILKTRSLISRLDSKEMAELANKALTECTTQDEVVKLVEEYTK

SEQ ID NO: 5279 - DNA, 1830 bp, Alloiococcus otitidis; identical to SEQ ID NO: 5273
  CDS (1)..(1827)

SEQ ID NO: 5280 - protein, 609 aa, Alloiococcus otitidis
MLVKAQMSPLVPTGQMKKKQLKQSKKLSKMREWLNKMGNKLTGIAASDGFAHAKAYPLVQPDLTVSKQSVEDTEAEVERFKAAIDQATEELQTIRQKAAESVGEEEAQVFDAHIMVLADPDLSDQTTTKIKEDQVNAAYAFEAVADNFITIFEGMEDNPYMQERASDIKDIKKRVIAHLLSVDLPDPSAIDEEVVVIAEDLTPSDTAQLNKKYVKAFVTDVGGRTSHSAIMARSLEIPAVVGTGQITSTVKKDQELVVDGVTGEVIIDPSDQEIEANEEKASEYESMKAEWNKLKDEPSISKDGVQVELAANIGTPKDLEGVSDNGAEGIGLYRTEFLYMDSPELPSEEDQFQAYKEVLEGVDGKPVVVRTMDIGGDKELPYLDLPDEMNPFLGYRALRISLDRDEIFRTQIRALLRASTYGQLRIMFPMVSNLDELRAAKAIVQEEKDKLEDQGQTISDSLQIGIMIEIPAAAMLADQFAKEVDFFSVGTNDLIQYTMAADRLNERVSYLYQPYNPSILRLIHNVIQAAHKEGKWAGMCGEMAGDQLAVPLLLGMGLDEFSMSATSILKTRSLISRLDSKEMAELANKALTECTTQDEVVKLVEEYTK

SEQ ID NO: 5281 - DNA, 264 bp, Alloiococcus otitidis
  CDS (7)..(261)
aggcctatgccctctgccccattatcgctgaccccttcaaggtctttgggggtcccaatattagctgccagttcaacttggactccatctttactgatgctgggttcatctttgagcttgttccattcagccttcatgctttcgtattcactagctttttcctcatttgcttcaatctcttggtcagatgggtcgatgatgacttcaccggtcaccccatcgactactagttcttggtcttttttgaccgtgctagtgatttga

SEQ ID NO: 5282 - protein, 85 aa, Alloiococcus otitidis
MPSAPLSLTPSRSLGVPILAASSTWTPSLLMLGSSLSLFHSAFMLSYSLAFSSFASISWSDGSMMTSPVTPSTTSSWSFLTVLVI

SEQ ID NO: 5283 - DNA, 270 bp, Alloiococcus otitidis
  CDS (4)..(267)
aatatggaaaaacgagactaccacattactgctgaaactggtatccacgctcgacctgctaccttactggttcaaactgcaagtaaattttcttctgacattaacttggaataccaaggcaagtcagtcaatcttaaatccatcatgggggttatgtccctaggtgctggtcaaggctcagatgtcaccattagtgccgacgggtcagatgaaaaagaagcaattgaagcaatcgaagaaactatcaaaaatgagggaatggctgaataa

SEQ ID NO: 5284 - protein, 88 aa, Alloiococcus otitidis
MEKRDYHITAETGIHARPATLLVQTASKFSSDINLEYQGKSVNLKSIMGVMSLGAGQGSDVTISADGSDEKEAIEAIEETIKNEGMAE

SEQ ID NO: 5285 - DNA, 435 bp, Alloiococcus otitidis
  CDS (52)..(432)
ccaacatatccaggaggggaaccgatcaaacgactggtggagtgtttttccatgtattcactcatatcgagtcggatcatggcttccttgctaccgaatagttccttagccagacttttcgctagttcggttttaccgacaccagttgggcctaggaagaggaaggagccaattgggcggtttttcttacggagaccaattcggttacgacgtatagctttggaaactttttcgacagcttggtcttggccaataacttgttcttccaaggtttgttctaggttcttaagctgggtttgttctttttctttcaactcaccgacaggaataccggttttaatctcaatgatattgataatatcttgttcggtaacagtaggggtggttgattcagggttttgctggtctagcatcccttcgaatttggaaatttga

SEQ ID NO: 5286 - protein, 127 aa, Alloiococcus otitidis
MYSLISSRIMASLLPNSSLARLFASSVLPTPVGPRKRKEPIGRFFLRRPIRLRRIALETFSTAWSWPITCSSKVCSRFLSWVCSFSFNSPTGIPVLISMILIISCSVTVGVVDSGFCWSSIPSNLEI

SEQ ID NO: 5287 - DNA, 435 bp, Alloiococcus otitidis; identical to SEQ ID NO: 5285
  CDS (37)..(432)

SEQ ID NO: 5288 - protein, 132 aa, Alloiococcus otitidis
MECFSMYSLISSRIMASLLPNSSLARLFASSVLPTPVGPRKRKEPIGRFFLRRPIRLRRIALETFSTAWSWPITCSSKVCSRFLSWVCSFSFNSPTGIPVLISMILIISCSVTVGVVDSGFCWSSIPSNLEI

SEQ ID NO: 5289 - DNA, 2307 bp, Alloiococcus otitidis
  CDS (271)..(2304)
aaggtcaaagatagtcaaacacctttcaaacactccactatcacgaaatttagtataaagaaaggaaggccgtttatgctatgccaaagatgtaaccaaagacaagctagcattcatttgacaactgctattaatggtcaaaaaagagaaatagacttatgtaaagaatgctaccgcgaaattaaagaacaagaacaacggggtcggatgaaccagagacgtaatgacccatttggagacttcaacaacctagatgacctctttggatccatgttgggtggctacggcgcaaaccgacaaggcattaatccagagtctgctatgggtggcggagacgctggcccaggccaaggtcaagctggtggcggtggactcttagatgaatatggtattaacctaacccagatggctagagagggcaaaatcgacccgattattggccgagacaaagaaactgaacgggttattgaaatcctaaaccgacgaaccaaaaacaacccagtccttattggggaagcgggtgttggtaaaactgctgtcgttgaaggcttagccaacaagattgcccaatccgatgtccctcaaaaattgcaagaccgagaagtgatccgcttagacgttgcttctttggttcaaggaactggaatccggggacaatttgaagaacggatgcaacaattaatcaatgaattgaaggaaagacaaaacattatcctctttattgatgaagtccacgaaattgtcggtgccggaaccgcagatggcagtaacatggatgctggtaacatcttaaaaccagccttagctagaggcgaactccaaatggttggggcgacaaccttaaatgaataccgtaaaatcgaaaaagactctgccctagagcgacgtttgcaacccgttaaagtagaagagccaagtcccgaacaaaccttgaccatcctcaaaggtatccaaggtaaatacgaagaattccacaaggttaaatacgaccctaaagccttaaaagctgcaacagatttgtccaaccgctatattatggaccggttcttacccgacaaggccatcgacctaattgatgaagccggttctaagaaaaacttgaccatcaaggtctctaaccctgatgagctcaaagaaaaaattgcccaagctgaaaaagctaaacaagaggccttggatgtcgaagactacgagaaagcagcccactaccgagatcaaatttccaaattcgaagggatgctagaccagcaaaaccctgaatcaaccacccctactgttaccgaacaagatattatcaatatcattgagattaaaaccggtattcctgtcggtgagttgaaagaaaaagaacaaacccagcttaagaacctagaacaaaccttggaagaacaagttattggccaagaccaagctgtcgaaaaagtttccaaagctatacgtcgtaaccgaattggtctccgtaagaaaaaccgcccaattggctccttcctcttcctaggcccaactggtgtcggtaaaaccgaactagcgaaaagtctggctaaggaactattcggtagcaaggaagccatgatccgactcgatatgagtgaatacatggaaaaacactccaccagtcgtttgatcggttcccctcctggatatgttggttacgatgaagctggccagcttactgaacaagtcagacggaaaccttacagccttatcctggtagacgaggttgaaaaagcccatcctgacgtcttgaacatgttccttcaaatattggatgacggccacttaaccgactcccaaggacgacgagtcaactttaaagaaaccattattatcatgaccagtaatgctggctcaaccgatgagattggaactaatattggttttggcaaagatgaagatacaaatgatgaactactcaaccgcttgaccaattacttcagaccagagttcttaaaccgtctcgatggcattgtagagtttgattctctctctaaagaaagtctcatttccattgtggacatcatgctcaatgaaatccaagaagcgattgctgaaagagacttaaccattgaagtcagccgtccagctaaagaaaaattagtggacctaggctacaaccctaaaatgggagcccgccctctccgccgtgtcgtcgaagaagaagtggaagaccaaattgcccaattctacttggacaacccaggtgtccacaacttactcgttgacctaaacgacgatggtgtgatcaaagtcagcgaaaacaaggctgaagctagtcaagctaagagctcagaaagcgaccaaaactaa

SEQ ID NO: 5290 - protein, 678 aa, Alloiococcus otitidis
MLGGYGANRQGINPESAMGGGDAGPGQGQAGGGGLLDEYGINLTQMAREGKIDPIIGRDKETERVIEILNRRTKNNPVLIGEAGVGKTAVVEGLANKIAQSDVPQKLQDREVIRLDVASLVQGTGIRGQFEERMQQLINELKERQNIILFIDEVHEIVGAGTADGSNMDAGNILKPALARGELQMVGATTLNEYRKIEKDSALERRLQPVKVEEPSPEQTLTILKGIQGKYEEFHKVKYDPKALKAATDLSNRYIMDRFLPDKAIDLIDEAGSKKNLTIKVSNPDELKEKIAQAEKAKQEALDVEDYEKAAHYRDQISKFEGMLDQQNPESTTPTVTEQDIINIIEIKTGIPVGELKEKEQTQLKNLEQTLEEQVIGQDQAVEKVSKAIRRNRIGLRKKNRPIGSFLFLGPTGVGKTELAKSLAKELFGSKEAMIRLDMSEYMEKHSTSRLIGSPPGYVGYDEAGQLTEQVRRKPYSLILVDEVEKAHPDVLNMFLQILDDGHLTDSQGRRVNFKETIIIMTSNAGSTDEIGTNIGFGKDEDTNDELLNRLTNYFRPEFLNRLDGIVEFDSLSKESLISIVDIMLNEIQEAIAERDLTIEVSRPAKEKLVDLGYNPKMGARPLRRVVEEEVEDQIAQFYLDNPGVHNLLVDLNDDGVIKVSENKAEASQAKSSESDQN

SEQ ID NO: 5291 - DNA, 2307 bp, Alloiococcus otitidis; identical to SEQ ID NO: 5289
  CDS (76)..(2304)

SEQ ID NO: 5292 - protein, 743 aa, Alloiococcus otitidis
MLCQRCNQRQASIHLTTAINGQKREIDLCKECYREIKEQEQRGRMNQRRNDPFGDFNNLDDLFGSMLGGYGANRQGINPESAMGGGDAGPGQGQAGGGGLLDEYGINLTQMAREGKIDPIIGRDKETERVIEILNRRTKNNPVLIGEAGVGKTAVVEGLANKIAQSDVPQKLQDREVIRLDVASLVQGTGIRGQFEERMQQLINELKERQNIILFIDEVHEIVGAGTADGSNMDAGNILKPALARGELQMVGATTLNEYRKIEKDSALERRLQPVKVEEPSPEQTLTILKGIQGKYEEFHKVKYDPKALKAATDLSNRYIMDRFLPDKAIDLIDEAGSKKNLTIKVSNPDELKEKIAQAEKAKQEALDVEDYEKAAHYRDQISKFEGMLDQQNPESTTPTVTEQDIINIIEIKTGIPVGELKEKEQTQLKNLEQTLEEQVIGQDQAVEKVSKAIRRNRIGLRKKNRPIGSFLFLGPTGVGKTELAKSLAKELFGSKEAMIRLDMSEYMEKHSTSRLIGSPPGYVGYDEAGQLTEQVRRKPYSLILVDEVEKAHPDVLNMFLQILDDGHLTDSQGRRVNFKETIIIMTSNAGSTDEIGTNIGFGKDEDTNDELLNRLTNYFRPEFLNRLDGIVEFDSLSKESLISIVDIMLNEIQEAIAERDLTIEVSRPAKEKLVDLGYNPKMGARPLRRVVEEEVEDQIAQFYLDNPGVHNLLVDLNDDGVIKVSENKAEASQAKSSESDQN

SEQ ID NO: 5293 - DNA, 1872 bp, Alloiococcus otitidis
  CDS (385)..(1869)
tctttacggaggtcaagcaggtataatagaccgtcaggccctccactgccagcaggtggactttacccaccccttgactggtcaaagagttcacttgcaagcctccttgccagaggatttgctagttttgtcccaacgattgaagctcgagggagtttaagttataaagatatagctgtgaccctaaaaccaggcagggtcgcaggcttttttagcttgcaagccttgtcgtctcaaggagaaattggtattatagttaggttaaatgaattgatagaaggagtccttatgtcacaaacaagtatcagtcaagaagtagataaaaggcgaacttttgctattatttcccacccggatgctgggaagaccaccatcactgaacaaatgcttctatttggaggagctatccgccaggcggggacggttaaggccaaaaaaacggggaaatttgccacctctgactggatggaaatcgaaaagcagagagggatttctgttactagttcggtcatgcaatttgactaccagggcaagcggattaatatcttggacacccctggtcacgaggatttttcggaagatacctaccgaaccttgatggccgttgatgcagctgttatggtggtggattccagcaagggaattgaatcacaaacggaaaaactctttaaggtctgccgcatgagggggattcctatctttaccttctttaacaaactagaccgagacggcagggaacccttggaccttgtagaagagttagaagaagttctaggcattgatgcctatgccatgaactggccaatggggtctggtcggaacttgttaggtctttatgatatttacaacaaccgggttcaagttcatgatcccgaccagtatgaggatggcagggacttgcttgatctagatgaagagggtgaaattgtgggcgaccaccccatcaaggctgacgcccagtacggacagaccctggaagaagcccttcttttgaaagaagcaggcaatgactttgaccgggaaaagatcatggcaggtgacttgaccccagtcttttttgggtcggccttaaccaactttggggtccaaaactttctagatgcctttttggaatttgccccaaagccttcttcccaggaagataaaaaacaccgggtcatccaacccagtgatcctaacttttctggttttgtttttaaaatccaagccaatatggacccccgacaccgggaccggatcgccttcttacggatctgttcaggccaatttgagcgagggatggatgtcaccctagcccggggcgacaaggccatgaaattgaccaattccacctcctttatggctgaagatcgggagaccgtgaccaaggcggttgcaggcgatattattggtctttatgacaccgggacctttcaaattggagataccatctactctggcaaggaaggggtagaatttaaggatctgcctcagtttacaccggaaatattcatgaaggttgaccccaaaaatgtgatgaagcaaaagtctttccacaagggactggaacaattggttcaagaaggagccatccaactttataagacctacctgggcaatgattatattgtaggggcagtgggccaacttcaatttgaagtattagagcaccggatgaaacatgaatataattccgacattgaaatgcagcccattggaagccgaattgcccgctggattgatcccgaccaattggatgagaagatgagttcctcacgaaatatgttggtgaaagaccggttcgaccaacccctcttcttattcgaaaatgaatttgccatgcgctggtttagcgataagtatccggatgttgagttgaaatccctcttatag

SEQ ID NO: 5294 - protein, 495 aa, Alloiococcus otitidis
MLLFGGAIRQAGTVKAKKTGKFATSDWMEIEKQRGISVTSSVMQFDYQGKRINILDTPGHEDFSEDTYRTLMAVDAAVMVVDSSKGIESQTEKLFKVCRMRGIPIFTFFNKLDRDGREPLDLVEELEEVLGIDAYAMNWPMGSGRNLLGLYDIYNNRVQVHDPDQYEDGRDLLDLDEEGEIVGDHPIKADAQYGQTLEEALLLKEAGNDFDREKIMAGDLTPVFFGSALTNFGVQNFLDAFLEFAPKPSSQEDKKHRVIQPSDPNFSGFVFKIQANMDPRHRDRIAFLRICSGQFERGMDVTLARGDKAMKLTNSTSFMAEDRETVTKAVAGDIIGLYDTGTFQIGDTIYSGKEGVEFKDLPQFTPEIFMKVDPKNVMKQKSFHKGLEQLVQEGAIQLYKTYLGNDYIVGAVGQLQFEVLEHRMKHEYNSDIEMQPIGSRIARWIDPDQLDEKMSSSRNMLVKDRFDQPLFLFENEFAMRWFSDKYPDVELKSLL

SEQ ID NO: 5295 - DNA, 1872 bp, Alloiococcus otitidis; identical to SEQ ID NO: 5293
  CDS (289)..(1869)

SEQ ID NO: 5296 - protein, 527 aa, Alloiococcus otitidis
MSQTSISQEVDKRRTFAIISHPDAGKTTITEQMLLFGGAIRQAGTVKAKKTGKFATSDWMEIEKQRGISVTSSVMQFDYQGKRINILDTPGHEDFSEDTYRTLMAVDAAVMVVDSSKGIESQTEKLFKVCRMRGIPIFTFFNKLDRDGREPLDLVEELEEVLGIDAYAMNWPMGSGRNLLGLYDIYNNRVQVHDPDQYEDGRDLLDLDEEGEIVGDHPIKADAQYGQTLEEALLLKEAGNDFDREKIMAGDLTPVFFGSALTNFGVQNFLDAFLEFAPKPSSQEDKKHRVIQPSDPNFSGFVFKIQANMDPRHRDRIAFLRICSGQFERGMDVTLARGDKAMKLTNSTSFMAEDRETVTKAVAGDIIGLYDTGTFQIGDTIYSGKEGVEFKDLPQFTPEIFMKVDPKNVMKQKSFHKGLEQLVQEGAIQLYKTYLGNDYIVGAVGQLQFEVLEHRMKHEYNSDIEMQPIGSRIARWIDPDQLDEKMSSSRNMLVKDRFDQPLFLFENEFAMRWFSDKYPDVELKSLL

SEQ ID NO: 5297 - DNA, 1872 bp, Alloiococcus otitidis; identical to SEQ ID NO: 5293
  CDS (217)..(1869)

SEQ ID NO: 5298 - protein, 551 aa, Alloiococcus otitidis
MQALSSQGEIGIIVRLNELIEGVLMSQTSISQEVDKRRTFAIISHPDAGKTTITEQMLLFGGAIRQAGTVKAKKTGKFATSDWMEIEKQRGISVTSSVMQFDYQGKRINILDTPGHEDFSEDTYRTLMAVDAAVMVVDSSKGIESQTEKLFKVCRMRGIPIFTFFNKLDRDGREPLDLVEELEEVLGIDAYAMNWPMGSGRNLLGLYDIYNNRVQVHDPDQYEDGRDLLDLDEEGEIVGDHPIKADAQYGQTLEEALLLKEAGNDFDREKIMAGDLTPVFFGSALTNFGVQNFLDAFLEFAPKPSSQEDKKHRVIQPSDPNFSGFVFKIQANMDPRHRDRIAFLRICSGQFERGMDVTLARGDKAMKLTNSTSFMAEDRETVTKAVAGDIIGLYDTGTFQIGDTIYSGKEGVEFKDLPQFTPEIFMKVDPKNVMKQKSFHKGLEQLVQEGAIQLYKTYLGNDYIVGAVGQLQFEVLEHRMKHEYNSDIEMQPIGSRIARWIDPDQLDEKMSSSRNMLVKDRFDQPLFLFENEFAMRWFSDKYPDVELKSLL

SEQ ID NO: 5299 - DNA, 1872 bp, Alloiococcus otitidis; identical to SEQ ID NO: 5293
  CDS (178)..(1869)

SEQ ID NO: 5300 - protein, 564 aa, Alloiococcus otitidis
MTLKPGRVAGFFSLQALSSQGEIGIIVRLNELIEGVLMSQTSISQEVDKRRTFAIISHPDAGKTTITEQMLLFGGAIRQAGTVKAKKTGKFATSDWMEIEKQRGISVTSSVMQFDYQGKRINILDTPGHEDFSEDTYRTLMAVDAAVMVVDSSKGIESQTEKLFKVCRMRGIPIFTFFNKLDRDGREPLDLVEELEEVLGIDAYAMNWPMGSGRNLLGLYDIYNNRVQVHDPDQYEDGRDLLDLDEEGEIVGDHPIKADAQYGQTLEEALLLKEAGNDFDREKIMAGDLTPVFFGSALTNFGVQNFLDAFLEFAPKPSSQEDKKHRVIQPSDPNFSGFVFKIQANMDPRHRDRIAFLRICSGQFERGMDVTLARGDKAMKLTNSTSFMAEDRETVTKAVAGDIIGLYDTGTFQIGDTIYSGKEGVEFKDLPQFTPEIFMKVDPKNVMKQKSFHKGLEQLVQEGAIQLYKTYLGNDYIVGAVGQLQFEVLEHRMKHEYNSDIEMQPIGSRIARWIDPDQLDEKMSSSRNMLVKDRFDQPLFLFENEFAMRWFSDKYPDVELKSLL

SEQ ID NO: 5301 - DNA, 531 bp, Alloiococcus otitidis
  CDS (64)..(528)
agaccaataatatcgcctgcaaccgccttggtcacggtctcccgatcttcagccataaaggaggtggaattggtcaatttcatggccttgtcgccccgggctagggtgacatccatccctcgctcaaattggcctgaacagatccgtaagaaggcgatccggtcccggtgtcgggggtccatattggcttggattttaaaaacaaaaccagaaaagttaggatcactgggttggatgacccggtgttttttatcttcctgggaagaaggctttggggcaaattccaaaaaggcatctagaaagttttggaccccaaagttggttaaggccgacccaaaaaagactggggtcaagtcacctgccatgatcttttcccggtcaaagtcattgcctgcttctttcaaaagaagggcttcttccagggtctgtccgtactgggcgtcagccttgatggggtggtcgcccacaatttcaccctcttcatctagatcaagcaagtccctgccatcctcatactggtcgggatcatga

SEQ ID NO: 5302 - protein, 155 aa, Alloiococcus otitidis
MELVNFMALSPRARVTSIPRSNWPEQIRKKAIRSRCRGSILAWILKTKPEKLGSLGWMTRCFLSSWEEGFGANSKKASRKFWTPKLVKADPKKTGVKSPAMIFSRSKSLPASFKRRASSRVCPYWASALMGWSPTISPSSSRSSKSLPSSYWSGS

SEQ ID NO: 5303 - DNA, 531 bp, Alloiococcus otitidis; identical to SEQ ID NO: 5301
  CDS (28)..(528)

SEQ ID NO: 5304 - protein, 167 aa, Alloiococcus otitidis
MVTVSRSSAIKEVELVNFMALSPRARVTSIPRSNWPEQIRKKAIRSRCRGSILAWILKTKPEKLGSLGWMTRCFLSSWEEGFGANSKKASRKFWTPKLVKADPKKTGVKSPAMIFSRSKSLPASFKRRASSRVCPYWASALMGWSPTISPSSSRSSKSLPSSYWSGS

SEQ ID NO: 5305 - DNA, 897 bp, Alloiococcus otitidis
  CDS (10)..(894)
aaaaacggaatgcaagtgacttggattaaccaaggaggccaactgatcttaagagacttcctcaaggaaaagggtctgtccagacgttttttaaccaaactgaagcaagtcaagggagctatccgggttaatcatcagcccgtccgggtgacctgggaactggtcaaaggggaccaggttgaacttgacctgcccaaagaggaggccaacccccacctagctcctaatgaagggggcttggacattctttacgaagatgactacttactggccttaaacaagtctgcaggtcaaatttgtctgccttcaccccaaaaccgaagctccagtttagccaataaggtcctagcttattacataaaagaaggagccgaaaacctgaagatccatccagttacccggctcgataaggacactagtggcatcatcctctttgccaagcaccagtatatccaccatttaatgacgactcggtcacacttgaccaaaaaatacttggccttggtccaaggtcaagtcactccaatagaaggggtcattgacctagcaatcggccggatggaggattcaattatcaaacgccaagttaagcaagggggtaaacctgcccaaacaagctaccgggtccttgaccagtccaaccaggcttccttgctaactattgacctcttaacgggccggacccaccagatcagggtccatttttcccacctgggccaccccttacttggggatagtctttacggaggtcaagcaggtataatagaccgtcaggccctccactgccagcaggtggactttacccaccccttgactggtcaaagagttcacttgcaagcctccttgccagaggatttgctagttttgtcccaacgattgaagctcgagggagtttaa

SEQ ID NO: 5306 - protein, 295 aa, Alloiococcus otitidis
MQVTWINQGGQLILRDFLKEKGLSRRFLTKLKQVKGAIRVNHQPVRVTWELVKGDQVELDLPKEEANPHLAPNEGGLDILYEDDYLLALNKSAGQICLPSPQNRSSSLANKVLAYYIKEGAENLKIHPVTRLDKDTSGIILFAKHQYIHHLMTTRSHLTKKYLALVQGQVTPIEGVIDLAIGRMEDSIIKRQVKQGGKPAQTSYRVLDQSNQASLLTIDLLTGRTHQIRVHFSHLGHPLLGDSLYGGQAGIIDRQALHCQQVDFTHPLTGQRVHLQASLPEDLLVLSQRLKLEGV

SEQ ID NO: 5307 - DNA, 834 bp, Alloiococcus otitidis
  CDS (13)..(831)
ggagcagtgtctatgcgtgtgacaattatcagcaaccaaagtgaaaagtccaaacaagtatccaagagcctggaagacttgctccaggaagaaggtgtcgtcatcgatggcctggcccctgatatcgtgatttctgtggggggagacgggaccctcttgtctgcctttcaccgctacgcccatatattagaccaggtccgctttattggagttcacacagggcacttgggtttttatactgattggcgagaatttaacctaactgacttagttgatcagatcaaaaatgacaagcaagaagccgaagagtatcctcttttggatgtccgaatttcctaccaaaatggtcaagaagccaaacactacctagccttgaacgagtccattttaaaattaatggacaaaaccttggtttgtgacctttttatccgagatgaattctttgaacgctttagaggagacggcttgtgtgtgtcgacgccgactgggtctactggctacaataagtcagtgggcggggccgttctccatcctagtttagaagccttgcaaattacggaaatcgccagtttaaacaaccgggtttttcggaccttgtcgtcccctattgttatttcccccaaagagtggattaccctaaagcctaagaatacctcttccatcaccttaatggtggaccagctagtctcagaagaagagaatgtggctgaagtaaaactgaagattgccaaggaacgggtcagttttgcccgttatgaccatacccacttttgggaccgggtggagaatgcctttttgggagtgaaaaaacggaatgcaagtgacttggattaa

SEQ ID NO: 5308 - protein, 273 aa, Alloiococcus otitidis
MRVTIISNQSEKSKQVSKSLEDLLQEEGVVIDGLAPDIVISVGGDGTLLSAFHRYAHILDQVRFIGVHTGHLGFYTDWREFNLTDLVDQIKNDKQEAEEYPLLDVRISYQNGQEAKHYLALNESILKLMDKTLVCDLFIRDEFFERFRGDGLCVSTPTGSTGYNKSVGGAVLHPSLEALQITEIASLNNRVFRTLSSPIVISPKEWITLKPKNTSSITLMVDQLVSEEENVAEVKLKIAKERVSFARYDHTHFWDRVENAFLGVKKRNASDLD

SEQ ID NO: 5309 - DNA, 834 bp, Alloiococcus otitidis; identical to SEQ ID NO: 5307
  CDS (7)..(831)

SEQ ID NO: 5310 - protein, 275 aa, Alloiococcus otitidis
MSMRVTIISNQSEKSKQVSKSLEDLLQEEGVVIDGLAPDIVISVGGDGTLLSAFHRYAHILDQVRFIGVHTGHLGFYTDWREFNLTDLVDQIKNDKQEAEEYPLLDVRISYQNGQEAKHYLALNESILKLMDKTLVCDLFIRDEFFERFRGDGLCVSTPTGSTGYNKSVGGAVLHPSLEALQITEIASLNNRVFRTLSSPIVISPKEWITLKPKNTSSITLMVDQLVSEEENVAEVKLKIAKERVSFARYDHTHFWDRVENAFLGVKKRNASDLD

SEQ ID NO: 5311 - DNA, 669 bp, Alloiococcus otitidis
  CDS (40)..(666)
tacaatggatggaggaaaagaaaaagaaataaagaggttatgattatgacgaaagactgggaccaatttttatacccatatgaactggcccttgaagagcttaaagtcaaattaaaagggcagcgagccatgtttcggcataaaaacctagcaagtcccattgaatttgtgactggtcgcttaaagcccgtggatagtatcttgtccaaggcagagcaagtccagcttccccttgaccagctagaagagatggaagatatagcaggtttgcggatcatgtgcccctttattgaggatgtttaccaagttgttgccatggtgaggaagcgacaggatatggaagttatcagagaaaaggactatatctccaataccaaggaaagtggctaccggtcatatcatttgatctgtcgctatccagtctacattattgaccaagtctacccccttttagttgagatccaagtccggacgctggccatgaatttctgggcttctattgaacactccttgaactacaagcaccaaggtgactacccggctgaaatcaagaaaggcttgcaggaaacggcagaccgggtctttcagttggatgaggagatgtcggccatccgcaagaagattagccaggaagaagaagcagaaaaaccagacgatgcaagcacttaa

SEQ ID NO: 5312 - protein, 209 aa, Alloiococcus otitidis
MIMTKDWDQFLYPYELALEELKVKLKGQRAMFRHKNLASPIEFVTGRLKPVDSILSKAEQVQLPLDQLEEMEDIAGLRIMCPFIEDVYQVVAMVRKRQDMEVIREKDYISNTKESGYRSYHLICRYPVYIIDQVYPLLVEIQVRTLAMNFWASIEHSLNYKHQGDYPAEIKKGLQETADRVFQLDEEMSAIRKKISQEEEAEKPDDAST

SEQ ID NO: 5313 - DNA, 606 bp, Alloiococcus otitidis
  CDS (22)..(603)
aaaatagaaaggctggttaggatgagccaagaattagaaattgaattcaagaaccttttaagcaaagacgaataccaggatttatttgacagctatcactttagtgaagtaaagcccatcattcaggaaaattattactttgacactgaggacctagtcttaaaagaacaatcttgttctgtccgcattagaattgtaaaggagcaagaccaggctgaaatcaccttgaaatccccctctcacaaccatgaccacctggttgaaaccactgaaaatattcctttagcccaagcccaacaaataatgaaagcaggccaagtcatcctgccccaatccattgcggaccagttaagccaagaaggcctaaaagtaagccagttaagcctcataacctggttaaaaactaaacgttttgaaaaaaactaccaagactgcctcttagtcctggaccatagttggtatggccagaccagtgactatgagttggaattagaagcccccagtcatgacaaaggactggatttattctatactatacttcttgaacataatattccccaacgtgataaagtcaacaaagtcgcccgggccttctctcaactttaa

SEQ ID NO: 5314 - protein, 194 aa, Alloiococcus otitidis
MSQELEIEFKNLLSKDEYQDLFDSYHFSEVKPIIQENYYFDTEDLVLKEQSCSVRIRIVKEQDQAEITLKSPSHNHDHLVETTENIPLAQAQQIMKAGQVILPQSIADQLSQEGLKVSQLSLITWLKTKRFEKNYQDCLLVLDHSWYGQTSDYELELEAPSHDKGLDLFYTILLEHNIPQRDKVNKVARAFSQL

SEQ ID NO: 5315 - DNA, 663 bp, Alloiococcus otitidis
  CDS (283)..(660)
taccatacaagtatagataagtcacacgataatagaaggtggattgctttgaattctaaagatatgatcgagattttcctatttgtaaatccgctagataagaatagcttggaaattgctcggtctgtatttcatttcccggatacccgtcatgaaaaggtcagtgttcgtttcgtcaccattaaagccaatgacgactcctacccaaatgccccacacaagggcaaatctttagacttcaaccctagttttatcccctgccttgccttccaggctgcttccatgcaagggaaaaaacggggcatccaattttttataaaattacaaagcctcctctttgaagaaggctatgaacttaacgaagaaaccattttagaagcagctcaagcaggacagattgacttgcagatgtttaaagaagacctctattcagacttggctaaaaaatcctaccaaagggacaagcacttagccaaggaaatggaggtcaacaaggtgcccacttgtatcatctactatcacacggaccatatgaacaaggcaaggatggagctcatgatcaatgaatacaccctccactacgcctgtaatacttgctctagagcatccaaactgaccaatgccctcctcccccttaatcccatctggcctaaccatatttaa

SEQ ID NO: 5316 - protein, 126 aa, Alloiococcus otitidis
MQGKKRGIQFFIKLQSLLFEEGYELNEETILEAAQAGQIDLQMFKEDLYSDLAKKSYQRDKHLAKEMEVNKVPTCIIYYHTDHMNKARMELMINEYTLHYACNTCSRASKLTNALLPLNPIWPNHI

SEQ ID NO: 5317 - DNA, 663 bp, Alloiococcus otitidis; identical to SEQ ID NO: 5315
  CDS (64)..(660)

SEQ ID NO: 5318 - protein, 199 aa, Alloiococcus otitidis
MIEIFLFVNPLDKNSLEIARSVFHFPDTRHEKVSVRFVTIKANDDSYPNAPHKGKSLDFNPSFIPCLAFQAASMQGKKRGIQFFIKLQSLLFEEGYELNEETILEAAQAGQIDLQMFKEDLYSDLAKKSYQRDKHLAKEMEVNKVPTCIIYYHTDHMNKARMELMINEYTLHYACNTCSRASKLTNALLPLNPIWPNHI

SEQ ID NO: 5319 - DNA, 663 bp, Alloiococcus otitidis; identical to SEQ ID NO: 5315
  CDS (49)..(660)

SEQ ID NO: 5320 - protein, 204 aa, Alloiococcus otitidis
MNSKDMIEIFLFVNPLDKNSLEIARSVFHFPDTRHEKVSVRFVTIKANDDSYPNAPHKGKSLDFNPSFIPCLAFQAASMQGKKRGIQFFIKLQSLLFEEGYELNEETILEAAQAGQIDLQMFKEDLYSDLAKKSYQRDKHLAKEMEVNKVPTCIIYYHTDHMNKARMELMINEYTLHYACNTCSRASKLTNALLPLNPIWPNHI

SEQ ID NO: 5321 - DNA, 495 bp, Alloiococcus otitidis
  CDS (31)..(492)
gcccttgctagcagctccaccaaggattttatgaacaaggacacttcctgctaccccccgttttctttgtttataactagaggactcgatcgagcagtcgtcgttgacaatgacatgatctaccttcataccagtagcaaccgctcgtttttcggcttcaaggaagttgttaacatctttttcgaaatttttaataataagcaagctaccctggttattgtaggtctcttgaataactttgaatatttggctaggacttggtggctcaaaaatggggcccattatagctgcatccaacatattttcccctatataaccatagtggccaggttcgtggccactgcctcctccagaaatgaggactaccttgttgtttgggattatggatttcttaacggcgtttgtaccgtctatcttaataagaacttggtcatatgttgcaacgatgccatcagtgatccggtcaataatttcctggtcggttttaccatttaa

SEQ ID NO: 5322 - protein, 154 aa, Alloiococcus otitidis
MNKDTSCYPPFSLFITRGLDRAVVVDNDMIYLHTSSNRSFFGFKEVVNIFFEIFNNKQATLVIVGLLNNFEYLARTWWLKNGAHYSCIQHIFPYITIVARFVATASSRNEDYLVVWDYGFLNGVCTVYLNKNLVICCNDAISDPVNNFLVGFTI

SEQ ID NO: 5323 - DNA, 1053 bp, Alloiococcus otitidis
  CDS (52)..(1050)
acaaatttatttagtaaagttagactaaatatatgttggaggttcttttgcatgagtggttttttaaatggtaaaaccgaccaggaaattattgaccggatcactgatggcatcgttgcaacatatgaccaagttcttattaagatagacggtacaaacgccgttaagaaatccataatcccaaacaacaaggtagtcctcatttctggaggaggcagtggccacgaacctggccactatggttatataggggaaaatatgttggatgcagctataatgggccccatttttgagccaccaagtcctagccaaatattcaaagttattcaagagacctacaataaccagggtagcttgcttattattaaaaatttcgaaaaagatgttaacaacttccttgaagccgaaaaacgagcggttgctactggtatgaaggtagatcatgtcattgtcaacgacgactgctcgatcgagtcctctagttataaacaaagaaaacggggggtagcaggaagtgtccttgttcataaaatccttggtggagctgctagcaagggcttatccctagctcaactagttaagctgggtaagcaagttgttgaccaaactcggacacttggcgtatcattttcaaatgctagtaccattagcaataaatcagcccaatataagctggccgaagatgaaatgttttttggtattggtatacatggtgagcctggttatcgcaaggaaacaatgcagtcatcagagagaatagcccttgaactcaccaataaactcatccagcaatataagaagaataatatcaaaaagctagccattatggtcaatggcctaggcagtacccccctactagaactttctatttttatgtctgaagtcatggactttctagatattaatcatttaggagtagattttaaactgatggggaattttttgaccgcttatgacactgctggtttatccttaacctttgtaaaccttaaagatgaaaagtggctagcttacttaaatgaaccaacagatgctttcggttggaaccattaa

SEQ ID NO: 5324 - protein, 333 aa, Alloiococcus otitidis
MSGFLNGKTDQEIIDRITDGIVATYDQVLIKIDGTNAVKKSIIPNNKVVLISGGGSGHEPGHYGYIGENMLDAAIMGPIFEPPSPSQIFKVIQETYNNQGSLLIIKNFEKDVNNFLEAEKRAVATGMKVDHVIVNDDCSIESSSYKQRKRGVAGSVLVHKILGGAASKGLSLAQLVKLGKQVVDQTRTLGVSFSNASTISNKSAQYKLAEDEMFFGIGIHGEPGYRKETMQSSERIALELTNKLIQQYKKNNIKKLAIMVNGLGSTPLLELSIFMSEVMDFLDINHLGVDFKLMGNFLTAYDTAGLSLTFVNLKDEKWLAYLNEPTDAFGWNH

SEQ ID NO: 5325 - DNA, 600 bp, Alloiococcus otitidis
  CDS (49)..(597)
tcacattgccttaccagtaacattagggtcaaagatggggaatgcaatatgagtggatccattattacccaaaagaaaatagctgatgccttcaagcaagtcttataccagtctgacttagaaagtattacagtatctcaactgatgaaacaagctaaaatgagacggcaaactttctatgattattttttggataagtatgacttagttaactggattttccaacaagagctaacagagatcattaacgataacatcggttaccgaaattggaaagatatcttaggcctcctagttgaatattttgaaagcaattgtcacttctacctcaaagttttaagctatgatggccaaaatgcttttaaattctttttaaaagaagagattgaccaactccttcaatccctattaatatcggcctataagtcaaaggataaaaatattgtctttaaaagtcatgagaatggtttatattgtagaattttaaccaatggattagtcgaaacagtaactgaatggatattaagtgagtgcccaatagatagtcgtgacttatccagatacttcattgattacttgaatcattttataagttcataa

SEQ ID NO: 5326 - protein, 183 aa, Alloiococcus otitidis
MSGSIITQKKIADAFKQVLYQSDLESITVSQLMKQAKMRRQTFYDYFLDKYDLVNWIFQQELTEIINDNIGYRNWKDILGLLVEYFESNCHFYLKVLSYDGQNAFKFFLKEEIDQLLQSLLISAYKSKDKNIVFKSHENGLYCRILTNGLVETVTEWILSECPIDSRDLSRYFIDYLNHFISS

SEQ ID NO: 5327 - DNA, 285 bp, Alloiococcus otitidis
  CDS (4)..(282)
ttcttgataattaagaggaccccctttccttggtcagcagccttgattgcttccagtacctggtctgatgtaggtgaagtaaagacctggccacaaacagctgcttggagcatgccttggcccacgaagccggcatgggctggttcatggccacttccacccccactgactaaggctacttggtcacctatttctttttgcaccacaacactcgttcctgcgacacggtccagtcggtcggcattttccctaacgataccattgaccatctcgtcaataatttga

SEQ ID NO: 5328 - protein, 93 aa, Alloiococcus otitidis
MIIKRTPFPWSAALIASSTWSDVGEVKTWPQTAAWSMPWPTKPAWAGSWPLPPPLTKATWSPISFCTTTLVPATRSSRSAFSLTIPLTISSII

SEQ ID NO: 5329 - DNA, 582 bp, Alloiococcus otitidis
  CDS (10)..(579)
attttgttggtgaaaatttctaaactttcaactacattatctttgctaaacattttctctcctcaccaggctgcagcttgtgtgtcttcttgcaataagtctaaccaattatcttctagtttgattaaggtcagggaaacaccttgcatttctagtgatgtcatcagattaccgactttaatgaaaggaagttggagatcgttttggtctagtaagcctaagatatcatttaggaaaatatattgttccattaaaggtgtcccacctagcccattgactagaacgccatatttatcttcagcagaccaggagaaggcttccttcaagtggcccacaatctcttgggcaatctcagctgatggtttcagttccgtcttttgcaagcctggttcaccgtggatgcccaccccgaactcgatttcattttcgtctaaaacaaaacctggtttgccaacttctgggacagttgcaccagttagggctacgcctaaagtattgatattggcaacagccttgtcaccaagctctttgagttctgttaggctggccccatttattgcagccgcacccagcaatttatga

SEQ ID NO: 5330 - protein, 190 aa, Alloiococcus otitidis
MKISKLSTTLSLLNIFSPHQAAACVSSCNKSNQLSSSLIKVRETPCISSDVIRLPTLMKGSWRSFWSSKPKISFRKIYCSIKGVPPSPLTRTPYLSSADQEKASFKWPTISWAISADGFSSVFCKPGSPWMPTPNSISFSSKTKPGLPTSGTVAPVRATPKVLILATALSPSSLSSVRLAPFIAAAPSNL

SEQ ID NO: 5331 - DNA, 582 bp, Alloiococcus otitidis; identical to SEQ ID NO: 5329
  CDS (4)..(579)

SEQ ID NO: 5332 - protein, 192 aa, Alloiococcus otitidis
MLVKISKLSTTLSLLNIFSPHQAAACVSSCNKSNQLSSSLIKVRETPCISSDVIRLPTLMKGSWRSFWSSKPKISFRKIYCSIKGVPPSPLTRTPYLSSADQEKASFKWPTISWAISADGFSSVFCKPGSPWMPTPNSISFSSKTKPGLPTSGTVAPVRATPKVLILATALSPSSLSSVRLAPFIAAAPSNL

SEQ ID NO: 5333 - DNA, 1008 bp, Alloiococcus otitidis
  CDS (67)..(1005)
ataaaggagaaagggtgtagacttgtgaaaaagattattaacgacccgagtcaaattattgacgagatggtcaatggtatcgttagggaaaatgccgaccgactggaccgtgtcgcaggaacgagtgttgtggtgcaaaaagaaataggtgaccaagtagccttagtcagtgggggtggaagtggccatgaaccagcccatgccggcttcgtgggccaaggcatgctccaagcagctgtttgtggccaggtctttacttcacctacatcagaccaggtactggaagcaatcaaggctgctgaccaaggaaagggggtcctcttaattatcaagaactattcgggtgacgtcatgaattttgaaatggctatggaattggcagaaatggaagacatccaagttgaaaaaattatagtcgatgacgatatagctgttgaagactcctccgatactcaaggaaaacgtggagttgctggtaccgtgctccttcataaattgctgggtgcggctgcaataaatggggccagcctaacagaactcaaagagcttggtgacaaggctgttgccaatatcaatactttaggcgtagccctaactggtgcaactgtcccagaagttggcaaaccaggttttgttttagacgaaaatgaaatcgagttcggggtgggcatccacggtgaaccaggcttgcaaaagacggaactgaaaccatcagctgagattgcccaagagattgtgggccacttgaaggaagccttctcctggtctgctgaagataaatatggcgttctagtcaatgggctaggtgggacacctttaatggaacaatatattttcctaaatgatatcttaggcttactagaccaaaacgatctccaacttcctttcattaaagtcggtaatctgatgacatcactagaaatgcaaggtgtttccctgaccttaatcaaactagaagataattggttagacttattgcaagaagacacacaagctgcagcctggtga

SEQ ID NO: 5334 - protein, 313 aa, Alloiococcus otitidis
MVNGIVRENADRLDRVAGTSVVVQKEIGDQVALVSGGGSGHEPAHAGFVGQGMLQAAVCGQVFTSPTSDQVLEAIKAADQGKGVLLIIKNYSGDVMNFEMAMELAEMEDIQVEKIIVDDDIAVEDSSDTQGKRGVAGTVLLHKLLGAAAINGASLTELKELGDKAVANINTLGVALTGATVPEVGKPGFVLDENEIEFGVGIHGEPGLQKTELKPSAEIAQEIVGHLKEAFSWSAEDKYGVLVNGLGGTPLMEQYIFLNDILGLLDQNDLQLPFIKVGNLMTSLEMQGVSLTLIKLEDNWLDLLQEDTQAAAW

SEQ ID NO: 5335 - DNA, 1008 bp, Alloiococcus otitidis; identical to SEQ ID NO: 5333
  CDS (25)..(1005)

SEQ ID NO: 5336 - protein, 327 aa, Alloiococcus otitidis
MKKIINDPSQIIDEMVNGIVRENADRLDRVAGTSVVVQKEIGDQVALVSGGGSGHEPAHAGFVGQGMLQAAVCGQVFTSPTSDQVLEAIKAADQGKGVLLIIKNYSGDVMNFEMAMELAEMEDIQVEKIIVDDDIAVEDSSDTQGKRGVAGTVLLHKLLGAAAINGASLTELKELGDKAVANINTLGVALTGATVPEVGKPGFVLDENEIEFGVGIHGEPGLQKTELKPSAEIAQEIVGHLKEAFSWSAEDKYGVLVNGLGGTPLMEQYIFLNDILGLLDQNDLQLPFIKVGNLMTSLEMQGVSLTLIKLEDNWLDLLQEDTQAAAW

SEQ ID NO: 5337 - DNA, 594 bp, Alloiococcus otitidis
  CDS (10)..(591)
ggagagaaaatgtttagcaaagataatgtagttgaaagtttagaaattttcaccaacaaaattcatgatcaaagaggttatctcagtgaattagataccccaattggtgatggtgaccatggtaataatatgaaccgtggggcaaccgcactaaaacaagaattatccaataaagaagcagataatttggccgatgtatttaaagtggctgccctgacttttatgtcaaaaattggaggtgcctcaggtccactttacggctcagcctttttagagatgagtaaggcagcccaagatgcatctgatcctgaatctattttatccgccggtttatctggtattcaaaaacgaggcaaggctgaagttggggacaagacaatggttgacttatggtcaggagctttagacctcattaaggagggacagctaacttatcaaaaactagatcagattgtcgaaaaaaccaaagaaatgaaagcccacaaggggcgtgcttcttacttgggtgaccgatcgattggccatatcgaccctggagctatgtcaagcaagtacctatttgaggcatttattaaagggggtgtttttgattag

SEQ ID NO: 5338 - protein, 194 aa, Alloiococcus otitidis
MFSKDNVVESLEIFTNKIHDQRGYLSELDTPIGDGDHGNNMNRGATALKQELSNKEADNLADVFKVAALTFMSKIGGASGPLYGSAFLEMSKAAQDASDPESILSAGLSGIQKRGKAEVGDKTMVDLWSGALDLIKEGQLTYQKLDQIVEKTKEMKAHKGRASYLGDRSIGHIDPGAMSSKYLFEAFIKGGVFD

SEQ ID NO: 5339 - DNA, 483 bp, Alloiococcus otitidis
  CDS (106)..(480)
aagcccacaaggggcgtgcttcttacttgggtgaccgatcgattggccatatcgaccctggagctatgtcaagcaagtacctatttgaggcatttattaaagggggtgtttttgattagcagaggaattgtcatggtatcccatgttgaagcaattgctcaaggtctaaagcaattaattgaacaagtagcaggggatgtccccgtaacgtttgctgggggaagtgaagatgatggagtaggtacgtcgtttgaggctgtcaatcaagccattatagacaatgaggcagatgaaattttagccttctatgacttaggtagtgctaagatgaacttagagttggccattgaaagcagcgacaaatcgattgacctgtttgatgttgcttttatcgaaggagtctacaccgctgcatccctccttcaagcagatgcgcccacaagtgccatcaaagaagaactggaccaactcattgtgaagtaa

SEQ ID NO: 5340 - protein, 125 aa, Alloiococcus otitidis
MFLISRGIVMVSHVEAIAQGLKQLIEQVAGDVPVTFAGGSEDDGVGTSFEAVNQAIIDNEADEILAFYDLGSAKMNLELAIESSDKSIDLFDVAFIEGVYTAASLLQADAPTSAIKEELDQLIVK

SEQ ID NO: 5341 - DNA, 483 bp, Alloiococcus otitidis; identical to SEQ ID NO: 5339
  CDS (85)..(480)

SEQ ID NO: 5342 - protein, 132 aa, Alloiococcus otitidis
MRHLLKGVFLISRGIVMVSHVEAIAQGLKQLIEQVAGDVPVTFAGGSEDDGVGTSFEAVNQAIIDNEADEILAFYDLGSAKMNLELAIESSDKSIDLFDVAFIEGVYTAASLLQADAPTSAIKEELDQLIVK

SEQ ID NO: 5343 - DNA, 483 bp, Alloiococcus otitidis; identical to SEQ ID NO: 5339
  CDS (16)..(480)

SEQ ID NO: 5344 - protein, 155 aa, Alloiococcus otitidis
MLLTWVTDRLAISTLELCQASTYLRHLLKGVFLISRGIVMVSHVEAIAQGLKQLIEQVAGDVPVTFAGGSEDDGVGTSFEAVNQAIIDNEADEILAFYDLGSAKMNLELAIESSDKSIDLFDVAFIEGVYTAASLLQADAPTSAIKEELDQLIVK

SEQ ID NO: 5345 - DNA, 1158 bp, Alloiococcus otitidis
  CDS (31)..(1155)
ggccttcaaaataagaaaggagcggctaacatgagaaaagccttcatcagtccaacaaaatatgtccagggtgaagaagaactcaacaatttaggatattatattgcccagtttggtaaaaagtctctaattgtcggtaaagacgaagacattcaacgggtaagtgaccaactcgcttatactgaagacaaatttgagctagaatttgtcaatgcaaactttcaaggtgaagctagccgtggtgaaattgaccgcttgcaacaattatttaaggaaaataattgtgattccgttgtcggtctgggtggcggtaaggccattgatactgctaagtgcgtagctgaaggtaaaaatgtggtgattgtgccaaccattgtagctcaagatgcgccaactagtcactcagccgttctttaccacgaagatggaacttttgatgactatgcttactttgagactagcccatcggtcatcctcattgatagctctgtcatagccaaggcacctacccgtttcctactagcaggaatgggagacgctttagcaacgtattttgaagcacgagctacccgtcggtcatactcaaacgttaatgccggcctgcccaacggtgtccgtgaaggagttgcccaagatgccaagggaactaatgcagcatttgctttagccaagctagcctatgaaatgcttttagaacatggccaagcagctaaacttgcctcagacttgaaccaggtcaccccagctttagaagacattattgaaacgaatgtcttactatctggcttaggcttcgaaagcgggggtttagcagctattcacgctatttacaacggcttttctatcctgcacgaaaaatttgatgccctgcatggtgaaattgtcagttttggtaccatctgccaattagtccttgaaaatgcacctaaagcagaagttgaagaagtccttgccttccaaaaagctatcggtcttccaatgaccttagctgacattggactcgataacatcacttatgaggaactgcaagcagtagcagaaaaagccttgatccctgaagagtcgatccactccatgcctttcgatgttacggtccaagctgttaaatcagctatcataacagctgataaattaggccaggcttacaaagaaagataa

SEQ ID NO: 5346 - protein, 375 aa, Alloiococcus otitidis
MRKAFISPTKYVQGEEELNNLGYYIAQFGKKSLIVGKDEDIQRVSDQLAYTEDKFELEFVNANFQGEASRGEIDRLQQLFKENNCDSVVGLGGGKAIDTAKCVAEGKNVVIVPTIVAQDAPTSHSAVLYHEDGTFDDYAYFETSPSVILIDSSVIAKAPTRFLLAGMGDALATYFEARATRRSYSNVNAGLPNGVREGVAQDAKGTNAAFALAKLAYEMLLEHGQAAKLASDLNQVTPALEDIIETNVLLSGLGFESGGLAAIHAIYNGFSILHEKFDALHGEIVSFGTICQLVLENAPKAEVEEVLAFQKAIGLPMTLADIGLDNITYEELQAVAEKALIPEESIHSMPFDVTVQAVKSAIITADKLGQAYKER

SEQ ID NO: 5347 - DNA, 159 bp, Alloiococcus otitidis
  CDS (1)..(156)
atgctgaaagaggctgaactaattaaaaaagtcaaaaggccaaataaccctcgaaagttagagttaaaggctaactttacgggggttactttatcatttgtgctggctgatgattttttccaaggacctaacacaagtcttcctttcttaagtgtctag

SEQ ID NO: 5348 - protein, 52 aa, Alloiococcus otitidis
MLKEAELIKKVKRPNNPRKLELKANFTGVTLSFVLADDFFQGPNTSLPFLSV

SEQ ID NO: 5349 - DNA, 1059 bp, Alloiococcus otitidis
  CDS (49)..(1056)
ttcttacaaggctcacgaagcccttcattcatagggagcttgtggcttatgatttacatcgatacccagtctagggatgcaaattttcactttgctttagaagaatatttgatgaaagagcattactttgatgatacagtttttctattttggcggacccagcccacagtcatgttaggcaagttccaaaacttgatggtagaactgaatcaggctaatttagccaaagacagggtaaagattacccggcgaaatacggggggcggaacgatatacaccgatatgggtggttttcaatattccttcattattccaggcaagagtcaagagattgactttaaaccttatatggaccaggtattagccagtctgcgagcacttgggattcctgccgagtacaatagccgtaatgacctttccttgtatgggaaaaagatttcgggtaatgcccagtgtgggatagaggggtataccgtccaccacggctcgctcctttataataccgatttatctaaacttcctctctatctcaacgcaccaaaatataagattaagtcaaagggaacacagtcagtcaaagaccggacggctaatataaggaatatgacccagatggactggtcggaggaagaattcaaaagtgccttccttgaagttttcctaggcgagcaggtaaaactggggcaattaactgaggaagactaccaggctgtccataacctggcccaagaaaaatttgaaagcttttcttgggtgaggggcaagaacccagcctacaccctttcaaacacttacttgtcggatggtgggttgatccaggctaggattgatgtgaaccacgatatcatccagtcttgccatttttcaggtgacttcttccacaattccaatgaagggacaatcgaaggcatggaaaaagagttagaaggagttgtttttgaccggcaagctgtgtggaattgcctgacccactcaccccataaaaatgccctttaccgcataggggtagaggacatccttcactctatttttgctcatgaagaagatttcagtaactga

SEQ ID NO: 5350 - protein, 336 aa, Alloiococcus otitidis
MIYIDTQSRDANFHFALEEYLMKEHYFDDTVFLFWRTQPTVMLGKFQNLMVELNQANLAKDRVKITRRNTGGGTIYTDMGGFQYSFIIPGKSQEIDFKPYMDQVLASLRALGIPAEYNSRNDLSLYGKKISGNAQCGIEGYTVHHGSLLYNTDLSKLPLYLNAPKYKIKSKGTQSVKDRTANIRNMTQMDWSEEEFKSAFLEVFLGEQVKLGQLTEEDYQAVHNLAQEKFESFSWVRGKNPAYTLSNTYLSDGGLIQARIDVNHDIIQSCHFSGDFFHNSNEGTIEGMEKELEGVVFDRQAVWNCLTHSPHKNALYRIGVEDILHSIFAHEEDFSN

SEQ ID NO: 5351 - DNA, 1059 bp, Alloiococcus otitidis; identical to SEQ ID NO: 5349
  CDS (40)..(1056)

SEQ ID NO: 5352 - protein, 339 aa, Alloiococcus otitidis
MWLMIYIDTQSRDANFHFALEEYLMKEHYFDDTVFLFWRTQPTVMLGKFQNLMVELNQANLAKDRVKITRRNTGGGTIYTDMGGFQYSFIIPGKSQEIDFKPYMDQVLASLRALGIPAEYNSRNDLSLYGKKISGNAQCGIEGYTVHHGSLLYNTDLSKLPLYLNAPKYKIKSKGTQSVKDRTANIRNMTQMDWSEEEFKSAFLEVFLGEQVKLGQLTEEDYQAVHNLAQEKFESFSWVRGKNPAYTLSNTYLSDGGLIQARIDVNHDIIQSCHFSGDFFHNSNEGTIEGMEKELEGVVFDRQAVWNCLTHSPHKNALYRIGVEDILHSIFAHEEDFSN

SEQ ID NO: 5353 - DNA, 945 bp, Alloiococcus otitidis
  CDS (316)..(942)
aagaaggggacacagtcactgttggcgatgtcattggaactattgatgaagatggggtggataaaaatggatgccaaaactaacaaaaacaattctgcagcaacaccaactagtgtcaagccacgtgtccgctttaatccaaatgatgttggtcaagttgacactatgtttaaggacttaaaattaaatacagtttgtacagaagcaacttgcccgaatataggggagtgtttcgcaagcggtacggcttcctttatgattttgggtaaacattgttctcggaactgccgcttttgcgatgtagcgactggtggtatggagcctgttgaccctatggaaccagagcacttggcggatggcgttaagcaattaaaacttaaccacgttgtgataacttgtgtggcccgagacgacttgccagatggtggggctggacaatttgctaaatgtattgaactcatccaccaagaatgcccagacgtaacggttgaggtcttgatttccgaccttcaaggtgaccacgatagtattgataaagttattcaggctaagcccgatattatcaaccacaatgttgaaacagtcgaacgtatttccccaatgattcgtcaccgggcaacatatgaacggtctcttggggtcttagaatacgttaaagaacaagaccctgaaattttcactaagactgggattatgctgggactcggtgagactgaggaagaaatttaccaaaccatggacgattgtctggctgttggggttgacttctttacaattggtcaatacctccaaccttctcctaaacactatccactttcagagtatgttagccgtcaaaaatttggtgaatacaaccgaatagggagacaaaaaggcttcaaatttgtcgcttctggtccccaagtccgtagttcttacaaggctcacgaagcccttcattcatag

SEQ ID NO: 5354 - protein, 209 aa, Alloiococcus otitidis
MEPVDPMEPEHLADGVKQLKLNHVVITCVARDDLPDGGAGQFAKCIELIHQECPDVTVEVLISDLQGDHDSIDKVIQAKPDIINHNVETVERISPMIRHRATYERSLGVLEYVKEQDPEIFTKTGIMLGLGETEEEIYQTMDDCLAVGVDFFTIGQYLQPSPKHYPLSEYVSRQKFGEYNRIGRQKGFKFVASGPQVRSSYKAHEALHS

SEQ ID NO: 5355 - DNA, 945 bp, Alloiococcus otitidis; identical to SEQ ID NO: 5353
  CDS (52)..(942)

SEQ ID NO: 5356 - protein, 297 aa, Alloiococcus otitidis
MGWIKMDAKTNKNNSAATPTSVKPRVRFNPNDVGQVDTMFKDLKLNTVCTEATCPNIGECFASGTASFMILGKHCSRNCRFCDVATGGMEPVDPMEPEHLADGVKQLKLNHVVITCVARDDLPDGGAGQFAKCIELIHQECPDVTVEVLISDLQGDHDSIDKVIQAKPDIINHNVETVERISPMIRHRATYERSLGVLEYVKEQDPEIFTKTGIMLGLGETEEEIYQTMDDCLAVGVDFFTIGQYLQPSPKHYPLSEYVSRQKFGEYNRIGRQKGFKFVASGPQVRSSYKAHEALHS

SEQ ID NO: 5357 - DNA, 945 bp, Alloiococcus otitidis; identical to SEQ ID NO: 5353
  CDS (28)..(942)

SEQ ID NO: 5358 - protein, 305 aa, Alloiococcus otitidis
MSLELLMKMGWIKMDAKTNKNNSAATPTSVKPRVRFNPNDVGQVDTMFKDLKLNTVCTEATCPNIGECFASGTASFMILGKHCSRNCRFCDVATGGMEPVDPMEPEHLADGVKQLKLNHVVITCVARDDLPDGGAGQFAKCIELIHQECPDVTVEVLISDLQGDHDSIDKVIQAKPDIINHNVETVERISPMIRHRATYERSLGVLEYVKEQDPEIFTKTGIMLGLGETEEEIYQTMDDCLAVGVDFFTIGQYLQPSPKHYPLSEYVSRQKFGEYNRIGRQKGFKFVASGPQVRSSYKAHEALHS

SEQ ID NO: 5359 - DNA, 945 bp, Alloiococcus otitidis; identical to SEQ ID NO: 5353
  CDS (22)..(942)

SEQ ID NO: 5360 - protein, 307 aa, Alloiococcus otitidis
MAMSLELLMKMGWIKMDAKTNKNNSAATPTSVKPRVRFNPNDVGQVDTMFKDLKLNTVCTEATCPNIGECFASGTASFMILGKHCSRNCRFCDVATGGMEPVDPMEPEHLADGVKQLKLNHVVITCVARDDLPDGGAGQFAKCIELIHQECPDVTVEVLISDLQGDHDSIDKVIQAKPDIINHNVETVERISPMIRHRATYERSLGVLEYVKEQDPEIFTKTGIMLGLGETEEEIYQTMDDCLAVGVDFFTIGQYLQPSPKHYPLSEYVSRQKFGEYNRIGRQKGFKFVASGPQVRSSYKAHEALHS

SEQ ID NO: 5361 - DNA, 327 bp, Alloiococcus otitidis
  CDS (61)..(324)
aatggaatcagtaaaaagaaagaaagcctttgggcaaaaaaattggaaaggaacacctatatgcaaaaagaagttttatttcctaaattgagtgagaagattgaaaacggtgtcgtcattagtctgagaaaagatataggagaggaaattcacaagggtgaagtcctctatgaggtggaaacggacaaggctgttcatgaaatagagtcaactgactgtggaactgtccttgagtttaaggtagaagaaggggacacagtcactgttggcgatgtcattggaactattgatgaagatggggtggataaaaatggatgccaaaactaa

SEQ ID NO: 5362 - protein, 88 aa, Alloiococcus otitidis
MQKEVLFPKLSEKIENGVVISLRKDIGEEIHKGEVLYEVETDKAVHEIESTDCGTVLEFKVEEGDTVTVGDVIGTIDEDGVDKNGCQN

SEQ ID NO: 5363 - DNA, 327 bp, Alloiococcus otitidis; identical to SEQ ID NO: 5361
  CDS (43)..(324)

SEQ ID NO: 5364 - protein, 94 aa, Alloiococcus otitidis
MERNTYMQKEVLFPKLSEKIENGVVISLRKDIGEEIHKGEVLYEVETDKAVHEIESTDCGTVLEFKVEEGDTVTVGDVIGTIDEDGVDKNGCQN

SEQ ID NO: 5365 - DNA, 1278 bp, Alloiococcus otitidis
  CDS (34)..(1275)
ggaaatttttctatatcgaaaggagttttaacaatgggaaaagtgattgataaggaccagtccattaagatcttacaagatattattcaaattaagtcagaaaacggccatgaagaagaagttgcgaaatacttccaatccttgttagcagaccacgatattgaatctaaattggttcaatatgatgacgaccgggctagcttggttgccgaaatttcgaacggtgaagggccagtcctaggtattaccggacacttggatgttgtgggtgctggtgatgaagacgattgggaatatcctcctttttcagcccatattgatgacgataatgtcctctggggacgtggggcatctgacatgaagccaggtattgcagctatggtgattaactttattgaatttaaagaaagccaaaactttaaaggtaccctaagactcctagcgacagttggtgaagaggttggccagtatgggtctaatcagttaacccgtgaaggctatgtggatgatttggatgccattttaattggagaaccatgtaatgtagggattgtctacacccacatgggatcactaaactataccttgacctctaaaggggaggctgcccactcatctgcccctcaattaggtgtgaatgcagtagaaaacttgactgaagctgtctctcaaatttcaaaagctgttgaagataaggctgaagaatttaataatgaagaactgggcaagactttccacaatgtaaccattatcaaaggaggaagtcaggtaaactctctcccggaatacgctgaatatgaagccaatgcccggactattccggaatttgataacaatggtgtcatggatatcgtaagaagtgttattgatgacctcaacaaaaaagatggctttgacctagctgttgaagtaacagccgaccaaccaccagtgaattcccctaaagattctaaattaatccaaactattcgggaagtcactaaagaccatgaaagattaggcttccaatacctattaaaacaaatgggtcaagttcttggcaccgacctggttaaagaccaacctgaactagggaaagtggatgaaatcctccccatagctattgcagggacaacagatgccgcccagtttacccaaggaaattcaaccatggatattgctgtatacggccctggtgtgccacagcttaaccacaagctgaatgaaagaatacctgtccaacaatacttggactttatcgatgtctacaacgatatcatcaagtcttacttgtcataa

SEQ ID NO: 5366 - protein, 414 aa, Alloiococcus otitidis
MGKVIDKDQSIKILQDIIQIKSENGHEEEVAKYFQSLLADHDIESKLVQYDDDRASLVAEISNGEGPVLGITGHLDVVGAGDEDDWEYPPFSAHIDDDNVLWGRGASDMKPGIAAMVINFIEFKESQNFKGTLRLLATVGEEVGQYGSNQLTREGYVDDLDAILIGEPCNVGIVYTHMGSLNYTLTSKGEAAHSSAPQLGVNAVENLTEAVSQISKAVEDKAEEFNNEELGKTFHNVTIIKGGSQVNSLPEYAEYEANARTIPEFDNNGVMDIVRSVIDDLNKKDGFDLAVEVTADQPPVNSPKDSKLIQTIREVTKDHERLGFQYLLKQMGQVLGTDLVKDQPELGKVDEILPIAIAGTTDAAQFTQGNSTMDIAVYGPGVPQLNHKLNERIPVQQYLDFIDVYNDIIKSYLS

SEQ ID NO: 5367 - DNA, 864 bp, Alloiococcus otitidis
  CDS (16)..(861)
tacaggaggaataaaatgagaaaagcctttatcagtccatcaaaatatgtccagggtgaaaaagagctcaataatttaggctactacattgcccaattgggtaaaaaagctctaatagttggtaaagaagaagatattgaccgggtaagtgaccaactggcttatactgaagacaaatttgaagtagaatttgtcaatgcagacttccaaggtgaagtgacccgtggtgagattactcgcttacaaaaaatcttcaaagaaaaccattgcgattgcctggtcggtttaggtggtggtaaggctattgatactgccaaatgtgtagctgaaggtaaaaatgtaataattgtcccaaccattgtggctcaagatgccccaacgagtcacttagccgacatctaccatgaagatggttcatttgatgccagtgcccactttcaagatagcccctctgtcgtcctggttgatacagctgttatcgccaaggcccctagccgctacctcctagctgggatgggggacgctttggctacttactttgaagcacgggctacccgccggtccaactcaaacgtgaatgctggccagcccaatggaatccaagatggcattgcccaagaagccaagggaactaatgcggcctatgccttagctaggctagcctatgacatgctcttagaacatggccaggcagctaaacttgcctctgatttgaaccaagtcacccctgctttagaagacataatcgaaaccaatgtcctactatctggcctaggctttgagagcggaggattagcagcagttcacgccatttatagcggcttttccctcttacacgaaaaaagtgatgcccctgcatggtga

SEQ ID NO: 5368 - protein, 282 aa, Alloiococcus otitidis
MRKAFISPSKYVQGEKELNNLGYYIAQLGKKALIVGKEEDIDRVSDQLAYTEDKFEVEFVNADFQGEVTRGEITRLQKIFKENHCDCLVGLGGGKAIDTAKCVAEGKNVIIVPTIVAQDAPTSHLADIYHEDGSFDASAHFQDSPSVVLVDTAVIAKAPSRYLLAGMGDALATYFEARATRRSNSNVNAGQPNGIQDGIAQEAKGTNAAYALARLAYDMLLEHGQAAKLASDLNQVTPALEDIIETNVLLSGLGFESGGLAAVHAIYSGFSLLHEKSDAPAW

SEQ ID NO: 5369 - DNA, 348 bp, Alloiococcus otitidis
  CDS (103)..(345)
cagcagttcacgccatttatagcggcttttccctcttacacgaaaaaagtgatgcccctgcatggtgaaattgtcagttttgggaccatttgccagttgctaatggaagatgctccaaaagcagaagttgaacaagtcctggccttccaagaggctgtcggcctgcccatgaccctatctgacatcggttttgatgatatgactgatgaggaactagaagctgtagcagaaaaggcaatgaatcccaaggggtcgatccagtccatgcctttcgatgtgacggtccaagctgttaaatcagctatcctaaccgccgatagattgggtcaagcttacaagaaaggataa

SEQ ID NO: 5370 - protein, 81 aa, Alloiococcus otitidis
MEDAPKAEVEQVLAFQEAVGLPMTLSDIGFDDMTDEELEAVAEKAMNPKGSIQSMPFDVTVQAVKSAILTADRLGQAYKKG

SEQ ID NO: 5371 - DNA, 348 bp, Alloiococcus otitidis; identical to SEQ ID NO: 5369
  CDS (49)..(345)

SEQ ID NO: 5372 - protein, 99 aa, Alloiococcus otitidis
MMPLHGEIVSFGTICQLLMEDAPKAEVEQVLAFQEAVGLPMTLSDIGFDDMTDEELEAVAEKAMNPKGSIQSMPFDVTVQAVKSAILTADRLGQAYKKG

SEQ ID NO: 5373 - DNA, 1833 bp, Alloiococcus otitidis
  CDS (19)..(1830)
aatggagcgaatacacttatgagtcaaaatgaattacctagccgccaggaagtcgaccctaagctgacctgggacttgaccccaatttttgctagtgaccaggcttgggaagaagcctttgaagaagtgaaagaccaaattaaagaagtggcccagtaccaaggcactttagaccagggacccaaggccttccaacaagccttggaagctaacttagaccttagccgcaagcttgaaagtgtctatgtttactcccacttaaaacatgaccaagacaccagtaatggggactaccaagccttagaagaccgagctcggggcttgctagcccaagctgctactgctacagcttggttccaacctgaattactggccttggaagaaggcaaggtggcttcttacttagaccaaaaccctgacttggaagtataccgtcatgaactcaaccagcaactagccaaaaaagaccatgtcctagatgcggacaaggaaggtcttttagcaggggcctctgaaatcttttcaagcggtagccaaacctttaatattttaaacaatgcagacttaaccttccccttggttcaaaatgaagagggcgaccaggtccggctctcccacggtttatacggtcaattattggagagtactgaccgcaatgtccgccgacaagcttttgaaaagttgtatgaagtttaccaatccttcaacaacaccctagcttccaccctccagaccgaagtgaagaaaaacaactacctagcccgggtccataactataactctgcccgacaccaggccctctctaataacaatatcccagaatcagtccatgagaccttgattgaagttgttaatgacaatttgcctcttttccaccgctacttggccttacgcaaaaaagtcttgggcttggatgaactccacatgtatgacctctacactccgattgctggggagtcttccttgaaatatacctttgaagaagctagggaagaaacctacaagagtttagccaaactgggtccagactataaggctgttttagaccgagccttccaggaccggtggattgatgtggttgaaaacaaaggaaaaagaagtggagcttattcttcaggtggttacgataccaacccttatgtcttgctcaactggcacgactccttggacaacctctataccctagtccatgaactcggccacagtgtccacagttactttacccgcaatagtcaaccctatatttatggggattacccaattttcttggctgagattgcctctacgaccaatgaaaacttgttgacccactatcttttagaaaatgctcaagaccccctcactcgggttcatgtcttgaaccactatcttgatggctttaaggggactgtttttagacaaactcaatttgctgaatttgaacaccatattcaccaggcagctgcagagggacaacccttaaccggccactacctcaaccaaacctacggggaattaaatgaccgctattatggtgatagtgtcgtcaatgatgaccaaattttctttgaatggtctcgtattccccacttctatatgaactattatgtttaccaatactccaccggcttctgtgctgctaccgccttggctgacaagctagttaaggaagaagatggtgctttaggagcctacctaggttacttgaaatccggtgacagtgactacccaattgaaattatgaaaaaagctggggtagacatgaccaacaaggcttatatcgagcgggccatgaaggtctttgaagaaagactaggccagttagaagatgccttggctgaattaaaagactag

SEQ ID NO: 5374 - protein, 604 aa, Alloiococcus otitidis
MSQNELPSRQEVDPKLTWDLTPIFASDQAWEEAFEEVKDQIKEVAQYQGTLDQGPKAFQQALEANLDLSRKLESVYVYSHLKHDQDTSNGDYQALEDRARGLLAQAATATAWFQPELLALEEGKVASYLDQNPDLEVYRHELNQQLAKKDHVLDADKEGLLAGASEIFSSGSQTFNILNNADLTFPLVQNEEGDQVRLSHGLYGQLLESTDRNVRRQAFEKLYEVYQSFNNTLASTLQTEVKKNNYLARVHNYNSARHQALSNNNIPESVHETLIEVVNDNLPLFHRYLALRKKVLGLDELHMYDLYTPIAGESSLKYTFEEAREETYKSLAKLGPDYKAVLDRAFQDRWIDVVENKGKRSGAYSSGGYDTNPYVLLNWHDSLDNLYTLVHELGHSVHSYFTRNSQPYIYGDYPIFLAEIASTTNENLLTHYLLENAQDPLTRVHVLNHYLDGFKGTVFRQTQFAEFEHHIHQAAAEGQPLTGHYLNQTYGELNDRYYGDSVVNDDQIFFEWSRIPHFYMNYYVYQYSTGFCAATALADKLVKEEDGALGAYLGYLKSGDSDYPIEIMKKAGVDMTNKAYIERAMKVFEERLGQLEDALAELKD

SEQ ID NO: 5375 - DNA, 828 bp, Alloiococcus otitidis
  CDS (154)..(825)
gtaattttgtgtttaggcttaggctctggcataatagaagaggtgatagcaatgaaaaaaataatgaatcttatgactatcctagccagtctaagcctattagtagcctgtggcccaaaagaagggccggttaaccaattagaccaagcccaagtggaagaagggccaggagcagatcaagctggggacgacaaagagcttgaagaagaccaaactccttccatccaagtccatcctcataaccccagccatgtcacagccttggttaacaaagaccattccttgccagaagactatgctcctagtgaccttgtccaggttcaagtacccactgtctttgataattcggaggccaaccaattgcgacaagaggcagctgaccaactagtggaacttttccaggaagcctctgaacagggttttaaactttttgcccggtcaggctaccggtcttacgcgacccaggcagacctatttgccaactatgtccaagcaaatggcttggaagcagcccagaccttttcagcccaagccggaaccagtgaacaccaaacgggtttagccatggatattacctcgccagaagttgactatgccttaaccgaatcttacattgatacagaaccgggccaatggctggctaataatgcccaccgctttggcttcattatgcggtatccacaaggcaaggaagacattaccggctaccagtttgagccttggcattaccggtattttggcccggaacttgctagctatctctttgaaaacgacttgacctatgaagaattcctagcagaagacgaagcagctgacatcattgattag

SEQ ID NO: 5376 - protein, 224 aa, Alloiococcus otitidis
MEEGPGADQAGDDKELEEDQTPSIQVHPHNPSHVTALVNKDHSLPEDYAPSDLVQVQVPTVFDNSEANQLRQEAADQLVELFQEASEQGFKLFARSGYRSYATQADLFANYVQANGLEAAQTFSAQAGTSEHQTGLAMDITSPEVDYALTESYIDTEPGQWLANNAHRFGFIMRYPQGKEDITGYQFEPWHYRYFGPELASYLFENDLTYEEFLAEDEAADIID

SEQ ID NO: 5377 - DNA, 828 bp, Alloiococcus otitidis; identical to SEQ ID NO: 5375
  CDS (52)..(825)

SEQ ID NO: 5378 - protein, 258 aa, Alloiococcus otitidis
MKKIMNLMTILASLSLLVACGPKEGPVNQLDQAQVEEGPGADQAGDDKELEEDQTPSIQVHPHNPSHVTALVNKDHSLPEDYAPSDLVQVQVPTVFDNSEANQLRQEAADQLVELFQEASEQGFKLFARSGYRSYATQADLFANYVQANGLEAAQTFSAQAGTSEHQTGLAMDITSPEVDYALTESYIDTEPGQWLANNAHRFGFIMRYPQGKEDITGYQFEPWHYRYFGPELASYLFENDLTYEEFLAEDEAADIID

SEQ ID NO: 5379 - DNA, 828 bp, Alloiococcus otitidis; identical to SEQ ID NO: 5375
  CDS (43)..(825)

SEQ ID NO: 5380 - protein, 261 aa, Alloiococcus otitidis
MIAMKKIMNLMTILASLSLLVACGPKEGPVNQLDQAQVEEGPGADQAGDDKELEEDQTPSIQVHPHNPSHVTALVNKDHSLPEDYAPSDLVQVQVPTVFDNSEANQLRQEAADQLVELFQEASEQGFKLFARSGYRSYATQADLFANYVQANGLEAAQTFSAQAGTSEHQTGLAMDITSPEVDYALTESYIDTEPGQWLANNAHRFGFIMRYPQGKEDITGYQFEPWHYRYFGPELASYLFENDLTYEEFLAEDEAADIID

SEQ ID NO: 5381 - DNA, 828 bp, Alloiococcus otitidis; identical to SEQ ID NO: 5375
  CDS (7)..(825)

SEQ ID NO: 5382 - protein, 273 aa, Alloiococcus otitidis
MCLGLGSGIIEEVIAMKKIMNLMTILASLSLLVACGPKEGPVNQLDQAQVEEGPGADQAGDDKELEEDQTPSIQVHPHNPSHVTALVNKDHSLPEDYAPSDLVQVQVPTVFDNSEANQLRQEAADQLVELFQEASEQGFKLFARSGYRSYATQADLFANYVQANGLEAAQTFSAQAGTSEHQTGLAMDITSPEVDYALTESYIDTEPGQWLANNAHRFGFIMRYPQGKEDITGYQFEPWHYRYFGPELASYLFENDLTYEEFLAEDEAADIID

SEQ ID NO: 5383 - DNA, 1140 bp, Alloiococcus otitidis
  CDS (22)..(1137)
catattttcctctcttataaaatgaaatttccagaaaaatgcgtattgtatagggaggaggtttttcttatgttactagccatcaaccgtcaggggaagttaatcgatgctggtcaattagatccagggcaagggtctgactattactgtccagcttgccgaggccgggtctttttaaagaaggggaccaagcggatggcccacttttgccactttcaagagaccacctgccagggtttttcggaaggagaaacgagggaccacctagcagggaagcggtttttagccaattatttcaagggcttttttgcccaggttgacctagaagcccccattcaggaaattaaccaaaggccagacctcctcctctcccaagagggagggaggataaaattggccatcgaattccagtgtagccccatttctgtccaacaaatcctagaccggacggcaggctatacaagaattggctatccagtcctctggatcctggggccgccccttcatttacgaactaagttactaaccctccaccgggccatgatgaactcccacctctttactagccccagccttttaagtttagacttaaagcaaaagagtttgcatgtccactataattttttgactggggagagtttaacctggcaaaaccaggtcttaaaagactttcccaagcaaaagcagctggcagatccattagcccaggctagcagaaaagcgcccagccagctgtacttaagtcaacaaagaagacaagttaaacggctccactaccacaaggccaagtctgcccgaccatttttccaactgctttacagccaccatgaccacttactagccttgccagattggatcttctacccttgcccttatgactggttgatcgtgacgccggcttatgaatggaagtaccgggtcttcaaatgggtcgaatctctaccccaggccaagtccatcaggctaaaagacttggcagacttactgaggactctggttcaggatgggcatttgcagatttatgagacagacggtctggcagaaaagttggtatttcaaaatttgactttttatctgggaattttaactgaccaaaaaatcttagtccaaaacaagctagtcagttggcagaaagtttga

SEQ ID NO: 5384 - protein, 372 aa, Alloiococcus otitidis
MKFPEKCVLYREEVFLMLLAINRQGKLIDAGQLDPGQGSDYYCPACRGRVFLKKGTKRMAHFCHFQETTCQGFSEGETRDHLAGKRFLANYFKGFFAQVDLEAPIQEINQRPDLLLSQEGGRIKLAIEFQCSPISVQQILDRTAGYTRIGYPVLWILGPPLHLRTKLLTLHRAMMNSHLFTSPSLLSLDLKQKSLHVHYNFLTGESLTWQNQVLKDFPKQKQLADPLAQASRKAPSQLYLSQQRRQVKRLHYHKAKSARPFFQLLYSHHDHLLALPDWIFYPCPYDWLIVTPAYEWKYRVFKWVESLPQAKSIRLKDLADLLRTLVQDGHLQIYETDGLAEKLVFQNLTFYLGILTDQKILVQNKLVSWQKV

SEQ ID NO: 5385 - DNA, 780 bp, Alloiococcus otitidis
  CDS (316)..(777)
agaggtggttggatgaaacagtattgggtattttccaaaaaggaatttgttgaaagtgttcgaaccaaaaagctcttggtcatcctattcgtttttgcaataattggtatctcgagtccctttactgccaaaataatgccagacctgatcgaaaatcttagccaaaccaacattgaaataaacctagctgaacccagctcctatgactctctagagcaattttttaagaatacccaacagatgggtttacttgtttttatcataacttttaacgggataatcaaaaatgagctaactagcggaagtctaattaatatgctaacgaaaggcctcaaaagaagggccgttatattgtccaaaattagtatcataagcttggtttggacaatagctatcttagtctcctttactataacctgggtctacacgattaacattttccctgaccaagaccataactatgttttattttcggtcttttgtatttggttatttggtctatttttactaatcctcttgattttagcttctttactgacaaaatcaagttacgggcatttgctattgacggctctagttatcatttttggtcttgttgtaaatgtatttgataaagttcaaaaatataacccaataaccctagctagcaaaaatatggatatcattaagggtgtgctagaactaagttatttttatcctagtctttggattactatcttagccagtgtcctaatgcttgtcatgtcgattcttatattcaataaaaaaagtataaactaa

SEQ ID NO: 5386 - protein, 154 aa, Alloiococcus otitidis
MLTKGLKRRAVILSKISIISLVWTIAILVSFTITWVYTINIFPDQDHNYVLFSVFCIWLFGLFLLILLILASLLTKSSYGHLLLTALVIIFGLVVNVFDKVQKYNPITLASKNMDIIKGVLELSYFYPSLWITILASVLMLVMSILIFNKKSIN

SEQ ID NO: 5387 - DNA, 780 bp, Alloiococcus otitidis; identical to SEQ ID NO: 5385
  CDS (13)..(777)

SEQ ID NO: 5388 - protein, 255 aa, Alloiococcus otitidis
MKQYWVFSKKEFVESVRTKKLLVILFVFAIIGISSPFTAKIMPDLIENLSQTNIEINLAEPSSYDSLEQFFKNTQQMGLLVFIITFNGIIKNELTSGSLINMLTKGLKRRAVILSKISIISLVWTIAILVSFTITWVYTINIFPDQDHNYVLFSVFCIWLFGLFLLILLILASLLTKSSYGHLLLTALVIIFGLVVNVFDKVQKYNPITLASKNMDIIKGVLELSYFYPSLWITILASVLMLVMSILIFNKKSIN

SEQ ID NO: 5389 - DNA, 1176 bp, Alloiococcus otitidis
  CDS (43)..(1173)
aagataattacaagaataaatagtatacaaggagactttctaatggatgaattacaaacaattttgtcagaatattggatgtttatactgcctcttatcatcattcaagttattcttcaaataactgcattaatacacttgtttaaacatagtcactacactcctgctagcaagttggtgtggacattagttattttgctatttcaaatgataggtccgatcgtctattttgcttttggagggggggaaacagagttgactgctatcttagaaatgaaagaaatatccaagatttttggagaaaagaaagttttagaccaagttaatttacgagtgccagaaaagtccatatttggttttgtggggaaaaacgggtcaggtaaaacaacgaccatgaatatcattcttggcttattagaagctagtggaggggaggtctttgtttgtggcgaaaaagtgaagtatggtgaaaccaagaccaatcgtcatatcggttatttaccagacgttccagccttttatggttatatgacggctaaggagtatttacgactttgtggtgaaatctctggccttcataagacaaaaagggttgaaaagtcagaagaactattggatctagtcggtttaaacgatgaacatggaaaaataatgactttttcgagggggatgaagcaaagattgggtttggctcaggctttaatcaatgaaccaaaacttttgatctgtgacgagcctagttcagcccttgatccaattggacgtaaaaaaatactggatatcttactatccataaagggaaaaacaacagttttgttttcaagccatattctaagtgatattgaaagagtatgtgaccgagttgcttttttagataagggatgtatccaggtccaagggggtataggagaccttttgtctaggacaaaccagaacaagtatttggttcaattttctagccaaaaagactgcgaccattttgatgacttcctaagatctggcaaagaaaaattatcggttgaaagagacaagacctcacttatgataaattttgctaacaagcaagttggggggacctacctccttgattcatttaatcagacaggtctagtccccttgaaatttgaaaaactagaaatttctttagaagacttgtttgaagaggtggttggatga

SEQ ID NO: 5390 - protein, 377 aa, Alloiococcus otitidis
MDELQTILSEYWMFILPLIIIQVILQITALIHLFKHSHYTPASKLVWTLVILLFQMIGPIVYFAFGGGETELTAILEMKEISKIFGEKKVLDQVNLRVPEKSIFGFVGKNGSGKTTTMNIILGLLEASGGEVFVCGEKVKYGETKTNRHIGYLPDVPAFYGYMTAKEYLRLCGEISGLHKTKRVEKSEELLDLVGLNDEHGKIMTFSRGMKQRLGLAQALINEPKLLICDEPSSALDPIGRKKILDILLSIKGKTTVLFSSHILSDIERVCDRVAFLDKGCIQVQGGIGDLLSRTNQNKYLVQFSSQKDCDHFDDFLRSGKEKLSVERDKTSLMINFANKQVGGTYLLDSFNQTGLVPLKFEKLEISLEDLFEEVVG

SEQ ID NO: 5391 - DNA, 1149 bp, Alloiococcus otitidis
  CDS (34)..(1146)
gctccttataaaattaagaaaaggaggaagaatatggataactttaatatatcaagaaaaatcgtggagtgtcggcagaagaaaggaattaaccaagaagagttggctaattttattggcgtatccaaagcatctgtctctaagtgggaaagaggacacagttttcctgaaattacttttcttccccttttggcaagctattttgatattacgattgatgaattaatgggctatgagccgcaaatgtccaaggaaaatattaggacattatacctaaaatgtgctaaggactttactgaacttcctttccaggatgtattcagctattgtgagacggtcatcaaaaaatactattcttgttaccctctcttatttcaaatggccaacttatatttaaataatagtaacttagcaggcagtatagaaaaacagttacaagttttttcacgagcaaaagacttgtttcaacgggtaagacttgaatgtgatgaactcaatttaattaaccaagcaactttatcggaagccctgtgccagctcacactcaatgaaccacagcaagctattgccttattaaaagagatcactagggaacttgtctctccagctcccctcctttctcgggcatatgagatggttggggcgaatgaaaaagccatgcaaagtctgcaaattgaaatctaccaatttttaattaactttttacagctattattatcttatatccccttattggaaggggatagatcggatttgaaagatatgaccgaaaaatacctagatatcgcaagggctttcaaaataaaagaattaagacctgacatgcttgccaatttttatctgttactaggtcaagaatacatgaaaatagggatgacaagagaaagtttagcttatttaaaagactacacccatatcgttacgggcaacatatacccacttgaactcaaaggtgatgaattttttaccaagatagaagaatggttgcaagactttccaattggaagagcagcccccagggatagccgtgtgattcgaaaaagtaattatgaagctcttgcagataatcctttgttttcgggtttgaaagatcgggatgactatcaatccatactaaataaattgaaagataattacaagaataaatag

SEQ ID NO: 5392 - protein, 371 aa, Alloiococcus otitidis
MDNFNISRKIVECRQKKGINQEELANFIGVSKASVSKWERGHSFPEITFLPLLASYFDITIDELMGYEPQMSKENIRTLYLKCAKDFTELPFQDVFSYCETVIKKYYSCYPLLFQMANLYLNNSNLAGSIEKQLQVFSRAKDLFQRVRLECDELNLINQATLSEALCQLTLNEPQQAIALLKEITRELVSPAPLLSRAYEMVGANEKAMQSLQIEIYQFLINFLQLLLSYIPLLEGDRSDLKDMTEKYLDIARAFKIKELRPDMLANFYLLLGQEYMKIGMTRESLAYLKDYTHIVTGNIYPLELKGDEFFTKIEEWLQDFPIGRAAPRDSRVIRKSNYEALADNPLFSGLKDRDDYQSILNKLKDNYKNK

SEQ ID NO: 5393 - DNA, 669 bp, Alloiococcus otitidis
  CDS (4)..(666)
gatatggaaatcgaacatataaatgaggataccatccgtgttaaaatagaaaactcagatctcattgaacgtggtgtgaccttccttgatttactcagcaaccaaaagcaaattgagcggttcttctactcaattttagaagaggtcgacttagatgacgagtttaaagactctaatgcggttaccttccaggtcatgcccaaaaacaatggccttgaactctttattagcaagggggccaatgttgatgacgacattatcaaccattttaatgaccaggctaatctttcctttgacgactatctgacgggggaaggcgactaccactatgaccttgaccatcatgaagaaggcagtaagcaagtggccccagacctacagcgaattatttcttttgatgacatcgaaaaagttatcctactagctcatgatattgatagtttctggatttcttcctccctttactaccaagaccagacctattacctctacttggcctttgaaggagaagaagaggataccaatgaaagctaccgtgaacttctctttgccaaagccttggaatatggtgaggaaagtcaagtaactaaagatgttatccaagagcattgcaaatgcattatcgaacaagatgctcttgggaccctttccaagtattttgaagactaa

SEQ ID NO: 5394 - protein, 221 aa, Alloiococcus otitidis
MEIEHINEDTIRVKIENSDLIERGVTFLDLLSNQKQIERFFYSILEEVDLDDEFKDSNAVTFQVMPKNNGLELFISKGANVDDDIINHFNDQANLSFDDYLTGEGDYHYDLDHHEEGSKQVAPDLQRIISFDDIEKVILLAHDIDSFWISSSLYYQDQTYYLYLAFEGEEEDTNESYRELLFAKALEYGEESQVTKDVIQEHCKCIIEQDALGTLSKYFED

SEQ ID NO: 5395 - DNA, 423 bp, Alloiococcus otitidis
  CDS (49)..(420)
tttgatctactaattatttctttaaaaatatttgctgggggaattgccatgcttaaactttttacctatccaggatcaattgaaagcaacaagctgaaatcttggttggaggaccaccaactggcctacactgagaaaaatttatttgaccaattgatgaccattgaagaattaaagcagattacctccctaactgaattaggggctcaggatattatcgcggatgaatatttttcagtcgtcaaacatgtggtcttagccgatgatatttcgataaaagaattgtacgattatatcagacaagaacccaaacttattaagttgcccatgttatttgatgaaaaacgcctattggttggctacgacgaaaatttcttaaatagtttcctgacttccccagccaaattaacagttgaatattaa

SEQ ID NO: 5396 - protein, 124 aa, Alloiococcus otitidis
MLKLFTYPGSIESNKLKSWLEDHQLAYTEKNLFDQLMTIEELKQITSLTELGAQDIIADEYFSVVKHVVLADDISIKELYDYIRQEPKLIKLPMLFDEKRLLVGYDENFLNSFLTSPAKLTVEY

SEQ ID NO: 5397 - DNA, 1068 bp, Alloiococcus otitidis
  CDS (49)..(1065)
ccaaagtgtcttacactagagttaactaaaaaggaaaggaaaagtgaaatgtattacgttaaaaatgaacgcgatggaaaagaaattcatgatgcttctaccaacctagcaatcgaataccacttgttaaaccatgttcacttggacgaaccgatcttgcttttttacatcaatgataatgctattattgtcgggaaaaaccaaaacacttatgaagaagtgaatacttcctatgtagaagaacacggggtcaatgtggttcgccggttaagtggtggcggggcagtttaccacgacttgggtgtcttgaacttttgctttttgacggatgatgacggggactccttccgtaactttaaaaaatttaccgatcctgtgattgatgccctacaaaaaatgggtgtttccggagctgaactccgcggccgcaacgacttagtcattggggataaaaaattctcaggcaatgccatgtactcaaaagatggccggatgacagcacacggtaccatgttatttaactcccaaattgatgcagttgtcggtgccttgaagcccaaaaagcacaagttggaatctaagggcgttaaatccattaaaagtcgggtcaccaacatcaaaccttacttgagtgatgaataccaaaacttgaatactaaaagcttccgcgaaaaaatcctactgaatatctttggtgttgactcaaccgaagatgtgaaagaatacaagttgactgatgaagactgggaacaaattgaagaatttagagacgagtatactggtaattgggactggaactacggggaatcaccagactttgaccttgaaagaagtgaacgcttgtctattggctctgtcgaagttaaattaaatgttgatgctggtaaaatccaagacatcaaaatttacggggactttttcggcatgggtgaaatttctgatgtggaagacaagttaagaggggtccaataccaggctaaagccattgaagaggctttgaaccaggtggatattgataaatactttggagatgttgagctttctgaactggttgatttgatctactaa

SEQ ID NO: 5398 - protein, 339 aa, Alloiococcus otitidis
MYYVKNERDGKEIHDASTNLAIEYHLLNHVHLDEPILLFYINDNAIIVGKNQNTYEEVNTSYVEEHGVNVVRRLSGGGAVYHDLGVLNFCFLTDDDGDSFRNFKKFTDPVIDALQKMGVSGAELRGRNDLVIGDKKFSGNAMYSKDGRMTAHGTMLFNSQIDAVVGALKPKKHKLESKGVKSIKSRVTNIKPYLSDEYQNLNTKSFREKILLNIFGVDSTEDVKEYKLTDEDWEQIEEFRDEYTGNWDWNYGESPDFDLERSERLSIGSVEVKLNVDAGKIQDIKIYGDFFGMGEISDVEDKLRGVQYQAKAIEEALNQVDIDKYFGDVELSELVDLIY

SEQ ID NO: 5399 - DNA, 378 bp, Alloiococcus otitidis
  CDS (16)..(375)
aggaggaagaaaaagatggcaagagttaaaggtggtactgtcacccgtcgtcgccgtaaacgtactttaaaactggctaaaggctactacggctcaaaacataaattataccgtgttgctaagcaacaggtcatgaaatcccacatgtatgcttaccgtgaccgcaaagtgaacaagcggaacttccgtaagctttggatttcccgtatcaatgcagcggctcgcttgaacggcttgagctactctaaatttatgcacggcttgaaattagcccacattgacttaaaccgaaaagtcttagcagacttggctgttaacgatgaagaagcttttgcttctttaaccgaccaagccaaagaagctattgcaaataactaa

SEQ ID NO: 5400 - protein, 120 aa, Alloiococcus otitidis
MARVKGGTVTRRRRKRTLKLAKGYYGSKHKLYRVAKQQVMKSHMYAYRDRKVNKRNFRKLWISRINAAARLNGLSYSKFMHGLKLAHIDLNRKVLADLAVNDEEAFASLTDQAKEAIANN

SEQ ID NO: 5401 - DNA, 588 bp, Alloiococcus otitidis
  CDS (37)..(585)
acgggacttctgtatggatttacagagttccgttctttgttttttcacaaatactttcggaggtggatcatcataaaggagctaattattaacgatcgcattcgcgacaatgagctacgattaatcggacatgatggagaacaaatcggtgttgtctcacgccagcaagccttagatgctgcagaacgtgcaggcatggacttggtccttgtctcaccaaatgcgaaaccttctgttgcccgtatcatggactacggcaaataccgctatgaacagcagaaaaaagaacgtgagcaacgtaaaaatcaaaagacagtggatgttaaagaaatccgcttaagtccaacgattgatgaccatgatttcaataccaagttgaagcaaggacgtaagtttttagacaaggatggagacaaagttaaagtttctattcgtttccgtggccgagcaatcactcataaagatatcgggcgtgaggttcttgagcgtttcgctgaagagaccaaggacgttggcgatatcgaatccaaagctaaaatggatggtcgttccatgtttatgatgattgcccctaaaagcgaaaaataa

SEQ ID NO: 5402 - protein, 183 aa, Alloiococcus otitidis
MFFHKYFRRWIIIKELIINDRIRDNELRLIGHDGEQIGVVSRQQALDAAERAGMDLVLVSPNAKPSVARIMDYGKYRYEQQKKEREQRKNQKTVDVKEIRLSPTIDDHDFNTKLKQGRKFLDKDGDKVKVSIRFRGRAITHKDIGREVLERFAEETKDVGDIESKAKMDGRSMFMMIAPKSEK

SEQ ID NO: 5403 - DNA, 801 bp, Alloiococcus otitidis
  CDS (31)..(798)
aacgcttacatacaaaacggaggtccaacaatgactaaagaatttccgactattgactaccatgttgaagacaagatagcctacattactttgaaccggccagaggttgggaatgcttttgccagcaccacttacggtgaaattagggaagccatggccatggcagaccaggacgaccaggttgatgtggtcattatatctggtaagggcaaacacttctgtgctggtggcgatattcaagagtttaacaagatgctagagaataaccaagtcatggaagaagaggatatcttggaaaccggtcgcctggctaaaagtctcttgacagccaaaaaacctgttattgcagctgttaacggggcagcggctggagctggctttggcttggccttggctagtgactttattattatggacaaagaagctagcctccacagtgcctttatccacctggccctaccaggtgatactagcttaatttacaccctacaaaaagccttgggcacctttaaggctaaagaacatgttatgttggggaaacccattgatgctaagctggctcaggaatacaatttaacctataagattgtagacaaggaagacctggcccaagctgccttggacttggcccacgacctgtctaaactatcgactaatggcttaatgctacaaaaagacctctttgcccgcatcttttacccagaactggatgactttaacgcagctgaagcccaaaacatgcaccatgcttccaagcacccagaccacttagaagcggtccgcaagttcctaggcaaataa

SEQ ID NO: 5404 - protein, 256 aa, Alloiococcus otitidis
MTKEFPTIDYHVEDKIAYITLNRPEVGNAFASTTYGEIREAMAMADQDDQVDVVIISGKGKHFCAGGDIQEFNKMLENNQVMEEEDILETGRLAKSLLTAKKPVIAAVNGAAAGAGFGLALASDFIIMDKEASLHSAFIHLALPGDTSLIYTLQKALGTFKAKEHVMLGKPIDAKLAQEYNLTYKIVDKEDLAQAALDLAHDLSKLSTNGLMLQKDLFARIFYPELDDFNAAEAQNMHHASKHPDHLEAVRKFLGK

SEQ ID NO: 5405 - DNA, 840 bp, Alloiococcus otitidis
  CDS (112)..(837)
tctatcgtgagtcaagctagttatttgggctttcaaccaggtactacctttatccacaagttaaatggcacgaccaaattaattgcatttctatcattatctttaattactatgatttcttatgatatacgatttttgaccttagttggcattataagtttgtgcctctttataaaagctgatgtatcatggaggtccatcaaagttcctgtttacttggtaatcgtatttgcgagtcttaatcttttaactatttatctttttgctcctgagcaaggtgttgagatttttggaagtagaaatgttatatgggaaggcataggaagatatacattgacttgggaacaattaatttatgaagctaatattctcttgaagtatttcaccacaataccattagcttttatttttattttaacgaccaatccgagtgagtttgcctcaagtctaaatagaattggtctatcatatcggatttcttacgccgtttctttaacactacgatatattcctgatatacagcaagagttttatgacattaaacaatctcagcaagctcgaggaatagaaatgtctaacaaagctcctatattagatcgtttaaaacatacagcgggaatagtcttacccattatttttaatagtctagatcggatagaagtggttagtaatgcaatggaattacgtcgttttggtaaaggaaaacaacgaacttggtatagatacaaaccctttagtcgattagatatagtctgcataattatagtttttttacttgttctgctaggtatcatgatgttaattctaaatggaagtcgtttttataaccccatggcctaa

SEQ ID NO: 5406 - protein, 242 aa, Alloiococcus otitidis
MISYDIRFLTLVGIISLCLFIKADVSWRSIKVPVYLVIVFASLNLLTIYLFAPEQGVEIFGSRNVIWEGIGRYTLTWEQLIYEANILLKYFTTIPLAFIFILTTNPSEFASSLNRIGLSYRISYAVSLTLRYIPDIQQEFYDIKQSQQARGIEMSNKAPILDRLKHTAGIVLPIIFNSLDRIEVVSNAMELRRFGKGKQRTWYRYKPFSRLDIVCIIIVFLLVLLGIMMLILNGSRFYNPMA

SEQ ID NO: 5407 - DNA, 840 bp, Alloiococcus otitidis; identical to SEQ ID NO: 5405
  CDS (25)..(837)

SEQ ID NO: 5408 - protein, 271 aa, Alloiococcus otitidis
MGFQPGTTFIHKLNGTTKLIAFLSLSLITMISYDIRFLTLVGIISLCLFIKADVSWRSIKVPVYLVIVFASLNLLTIYLFAPEQGVEIFGSRNVIWEGIGRYTLTWEQLIYEANILLKYFTTIPLAFIFILTTNPSEFASSLNRIGLSYRISYAVSLTLRYIPDIQQEFYDIKQSQQARGIEMSNKAPILDRLKHTAGIVLPIIFNSLDRIEVVSNAMELRRFGKGKQRTWYRYKPFSRLDIVCIIIVFLLVLLGIMMLILNGSRFYNPMA

SEQ ID NO: 5409 - DNA, 840 bp, Alloiococcus otitidis; identical to SEQ ID NO: 5405
  CDS (7)..(837)

SEQ ID NO: 5410 - protein, 277 aa, Alloiococcus otitidis
MSQASYLGFQPGTTFIHKLNGTTKLIAFLSLSLITMISYDIRFLTLVGIISLCLFIKADVSWRSIKVPVYLVIVFASLNLLTIYLFAPEQGVEIFGSRNVIWEGIGRYTLTWEQLIYEANILLKYFTTIPLAFIFILTTNPSEFASSLNRIGLSYRISYAVSLTLRYIPDIQQEFYDIKQSQQARGIEMSNKAPILDRLKHTAGIVLPIIFNSLDRIEVVSNAMELRRFGKGKQRTWYRYKPFSRLDIVCIIIVFLLVLLGIMMLILNGSRFYNPMA

SEQ ID NO: 5411 - DNA, 1740 bp, Alloiococcus otitidis
  CDS (16)..(1737)
aaaaggaagattaaaatgactcaaccgatcatttcctttgaccaggttagctttcagtatgatagccaagctgaacctagcctaatagatataagttttcaaattcaacaaggtgaaattgttctgatacttggaccttcaggatcaggcaaatcgactatagctaaatgtattaatggacaaattcctcacgcttttcctggggatttacaagggaatattcaggtaaatggagttgatcctcggtcaacttcattatttgaattgtcattagtagtagggacagttttacaagacacagatggacaatttgttggcttgactgtagcagaagacctagcctttgctttagaaaatgatagagttgaccaagctaaaatgaaggatatagtacaaggctggagtcaagctttagatattgaaaatttattggaaaaaaatcctcataatctatctggtggacagaaacaacgtgtttcaatcggtggtgttttagtaaatgatattcctatattgttatttgatgaacctttggccaacttagatccagcttcaggggaaggaacgattgagttaattaaccgtttaaacaaagaattaggtgtgacggttgttataatcgagcaccgtttagaagagtgcttattagctggcattgaccaagtaattttacttaacgaaggtaaattagtatctaacacatcagttagtgacttattaaagacagaccttttaagtcaagtaggtttaaggcaaccattgtatatacaagcacttaaatatgctggagtagacatcaacgaaattgaatcgatcggacactaccgaaaaaccacaattgacccaaattatttaaacaaagtagagaagtgggcacaatcaatacatagaaatgacgaaaataattgtggtgaaataatattaaaaacagaaaatttgacctatcagtatccaaatcaagcgacaccagttctccagaacatcagttttgaaattcgtagaggagataaagttagcttagtaggttcgaatggtgccgggaagtctaccctagcaaaagtaatatgtggattcctaagacctaaaaaaggaacaatagcaataatgggacaggatattagtaactattccataaaagaaattgcagaccgagtaggctacgtaatgcaaaatcctaactcaatgatttcacagaatttaatttttgatgaagttgctctaggtctcaaaaatagaggaattgctagtgatgagattataaaaagggttcatgaaactttgcgtatttgtggactatatccgatgagaaattggcctatctcagccctttcctatggacaaaagaggagggtaacgatagcaagcattcttgttttagaaccacaaatattgattttggatgaaccgactgctgggcaagattattacaattatactcaattcatgacttttgttgactcgttaaaccgtgatcaaaatttaactattttaatgatcacccatgatatgcatttaatgcaggagtatactggacggagtttagtctttaaccaaggacatttattagctgacactactcccgcagtaattttaagtaatcataggctaatgaccaaatcagatttagtaccgaccagtttgtattatttaggtcaagacttaacgagtcttactactgaagattttattcagaagttcatggattacgaaagtaaggtgatctatcgtgagtcaagctag

SEQ ID NO: 5412 - protein, 574 aa, Alloiococcus otitidis
MTQPIISFDQVSFQYDSQAEPSLIDISFQIQQGEIVLILGPSGSGKSTIAKCINGQIPHAFPGDLQGNIQVNGVDPRSTSLFELSLVVGTVLQDTDGQFVGLTVAEDLAFALENDRVDQAKMKDIVQGWSQALDIENLLEKNPHNLSGGQKQRVSIGGVLVNDIPILLFDEPLANLDPASGEGTIELINRLNKELGVTVVIIEHRLEECLLAGIDQVILLNEGKLVSNTSVSDLLKTDLLSQVGLRQPLYIQALKYAGVDINEIESIGHYRKTTIDPNYLNKVEKWAQSIHRNDENNCGEIILKTENLTYQYPNQATPVLQNISFEIRRGDKVSLVGSNGAGKSTLAKVICGFLRPKKGTIAIMGQDISNYSIKEIADRVGYVMQNPNSMISQNLIFDEVALGLKNRGIASDEIIKRVHETLRICGLYPMRNWPISALSYGQKRRVTIASILVLEPQILILDEPTAGQDYYNYTQFMTFVDSLNRDQNLTILMITHDMHLMQEYTGRSLVFNQGHLLADTTPAVILSNHRLMTKSDLVPTSLYYLGQDLTSLTTEDFIQKFMDYESKVIYRESS

SEQ ID NO: 5413 - DNA, 558 bp, Alloiococcus otitidis
  CDS (331)..(555)
atgcaagcgagcaataaatcatccttaaccaccctagtagccattggtattggggcagcagtgttttttatattgggtaggtttttatctattccagttggtattcctaataccagttttgaaactacttatccatttttatccttaatgtcggtcatatttggccctttagctggtgcactaatcggtttccttggacacactataaaagatttattaacttatggagcttggtggtcttggattttagcctcaggtgtaacagggattggctatggaatcgttgggaaaacattaaaagtagagaaaggtacatttactaaaaaagatatggttaaatttaatattggtcaagtgattgtaaatattttatcttggcttcttgtagcaccattattagacattctgatctacgcagagcctgctaataaagtatttatccaaggtgccgtatctgctttaatgaattctatagctgtagctgttctagggactatccttattaaggcctacgcttctacacgtagtcaatccggtagtttgaaaaaggaagattaa

SEQ ID NO: 5414 - protein, 75 aa, Alloiococcus otitidis
MVKFNIGQVIVNILSWLLVAPLLDILIYAEPANKVFIQGAVSALMNSIAVAVLGTILIKAYASTRSQSGSLKKED

SEQ ID NO: 5415 - DNA, 558 bp, Alloiococcus otitidis; identical to SEQ ID NO: 5413
  CDS (1)..(555)

SEQ ID NO: 5416 - protein, 185 aa, Alloiococcus otitidis
MQASNKSSLTTLVAIGIGAAVFFILGRFLSIPVGIPNTSFETTYPFLSLMSVIFGPLAGALIGFLGHTIKDLLTYGAWWSWILASGVTGIGYGIVGKTLKVEKGTFTKKDMVKFNIGQVIVNILSWLLVAPLLDILIYAEPANKVFIQGAVSALMNSIAVAVLGTILIKAYASTRSQSGSLKKED

SEQ ID NO: 5417 - DNA, 876 bp, Alloiococcus otitidis
  CDS (7)..(873)
ataataatgatgaaagtgggcaggttaatgagtcgaaaacatttggtcttgcaatccgattttggtttggatgatggggcagttgccgccatgtatggtgtggcttattcagtagcccctaacattactatctctaatctaactcatgggattaatccttacaatgtatttgatggctcctatcgtttaattcaaaccgtcaattattggcccgagggaacagtctttgtttccgtagttgacccaggggtcggcactgaccggcaaagtgtggtggctaaattaaaatcgggtcactacatcgtaacacccaataatggtaccttatcccatgtccataaatatattggccttgaatcactgaaagaaattgatgaaacagtgaaccgcctggcccattcggaagggagtcacaccttccatggccgagatatctatgtatataatggtgctttactggctgaggacgagacttattatgaccagttaaaagccattcccttaaattcgcttgaaagtcttgaacttctagacccgaactctgatggccaaactaggattgagggggttattgatatatttgacatacggttcggctcattatggactaatattccggctagacttttaaaggaacttagcattcaatcaggtgatcaagtaaaggtgaccatagaacatgatggggttcaaaggtatcagaattatatgcggtttggtcatagctttgcagatgtccaagtcggtgaaccaattgcctatatcaattctttacttcacttgggcattgccatcaaccaaaagagtttttcggaaacctataatataggtcggggcaatgactggctcattttaatagagaaagtaggaaagtaa

SEQ ID NO: 5418 - protein, 289 aa, Alloiococcus otitidis
MMKVGRLMSRKHLVLQSDFGLDDGAVAAMYGVAYSVAPNITISNLTHGINPYNVFDGSYRLIQTVNYWPEGTVFVSVVDPGVGTDRQSVVAKLKSGHYIVTPNNGTLSHVHKYIGLESLKEIDETVNRLAHSEGSHTFHGRDIYVYNGALLAEDETYYDQLKAIPLNSLESLELLDPNSDGQTRIEGVIDIFDIRFGSLWTNIPARLLKELSIQSGDQVKVTIEHDGVQRYQNYMRFGHSFADVQVGEPIAYINSLLHLGIAINQKSFSETYNIGRGNDWLILIEKVGK

SEQ ID NO: 5419 - DNA, 1962 bp, Alloiococcus otitidis
  CDS (13)..(1959)
ggaggaaaaacaatgtcacaaattaatattaccctgccagatgggtctgttaaaagttttgaccatgaaccgaccacacaagaggtagcggaaggtattggcaagtctctggccaaggctggcctagccggtaagttcaagggggacttggtggattatcaaacccccttgactgaagacggtgacttggaaattgtaactgataaacacgaagatgccttgtctatcctacggcactcagcggcccacttaatggcccaagccattaaacgcctttacccggaagccaagttcggggtgggacctgccatagattcaggcttttactatgatacagataccgaccagcccctgacagaagaagaccttggccggattgaaaaagaaatgaaaaaaattgttaaagaaaacctgcctattgttcggaaagaaattagccggcaagaggccttagacctctttgcagatgacccttacaagttagagttgatccatgaactaccagaggatgaagtgatttccatttatgagcagggtgaattcgttgacttgtgccgggggattcatgtcccctcaaccaaatatatcaaggtctttaagctcttgtccctagcaggtgcctactggcggggtaattctgacaacaagatgatgcaaagggtttatgggacagccttcttcaagcagtctgacctggatgaatttctccgtctaagagaagaagctaaagaaagagaccaccgcaaaatcggcaaagaattggacctcttcgcccttaacccagatgttgggtctggcctgccattttggttgccaaaaggcgctaccatccgccgggtaattgaacgctatattacagacaaggaaattaacttaggctaccaacacgtctacaccccaatcatggctgatgctaagctctacaagacttctggccactgggaccactaccaagatgacatgttcccaccaatggacatgggggatggggagatgttggtcttaagacccatgaactgcccccaccacatgcaggtttataaaaacgccacccactcctaccgggaactgccaatccggattgctgagctgggtcagatgcaccggtatgaaaaatcaggtgccttgtctggcttgcaacgggtccgggaaatgaccttgaacgatgcccacgtttttgtccgtcccgaccaaattaaagaagagttcaaccgggtagtcaacctggtcttagaagtctacaaggacttcaatattactgactaccgcttccgcttgagcttgcgggaccctgacaacaaggacaagtactttgatgatgaccaaatgtgggttaaagctgagaacatgctaagggaaaccttagacgaagcagatattgactattttgaagcgacaggggaagcagccttttacggtcctaaattagacgtccaagttaagactgctattggcctagaagagaccttgtcgaccgtccaacttgacttcctcttgcctgagaaatttgacttgacctatgtgggtgaagatggccaagatgaccaccggcccgttgtcatccaccggggggttgtgtcaaccatggaacgcttcattgcctacttgattgaagaatacaagggagccttcccaacctggctggccccaatccaaaccgtcctgatcccggtgaacctggatgcccacctggaaggagtcaaggaactggctagcaagcttcgagctcaaggcatccgggtccaagtagacgaccggaatgaaaaactgggctacaagatccgccagtcccagacccaaaaaatcccctaccaattggttatcggtgatgacgagttagaatctgggtctgtctcggtccgtaagtacgggcaaaaagacagcccaaccctccaatttgaagactttatggacctcattcaaaaagatatcgccagcaagagccaggaagtgacggcttaa

SEQ ID NO: 5420 - protein, 649 aa, Alloiococcus otitidis
MSQINITLPDGSVKSFDHEPTTQEVAEGIGKSLAKAGLAGKFKGDLVDYQTPLTEDGDLEIVTDKHEDALSILRHSAAHLMAQAIKRLYPEAKFGVGPAIDSGFYYDTDTDQPLTEEDLGRIEKEMKKIVKENLPIVRKEISRQEALDLFADDPYKLELIHELPEDEVISIYEQGEFVDLCRGIHVPSTKYIKVFKLLSLAGAYWRGNSDNKMMQRVYGTAFFKQSDLDEFLRLREEAKERDHRKIGKELDLFALNPDVGSGLPFWLPKGATIRRVIERYITDKEINLGYQHVYTPIMADAKLYKTSGHWDHYQDDMFPPMDMGDGEMLVLRPMNCPHHMQVYKNATHSYRELPIRIAELGQMHRYEKSGALSGLQRVREMTLNDAHVFVRPDQIKEEFNRVVNLVLEVYKDFNITDYRFRLSLRDPDNKDKYFDDDQMWVKAENMLRETLDEADIDYFEATGEAAFYGPKLDVQVKTAIGLEETLSTVQLDFLLPEKFDLTYVGEDGQDDHRPVVIHRGVVSTMERFIAYLIEEYKGAFPTWLAPIQTVLIPVNLDAHLEGVKELASKLRAQGIRVQVDDRNEKLGYKIRQSQTQKIPYQLVIGDDELESGSVSVRKYGQKDSPTLQFEDFMDLIQKDIASKSQEVTA

SEQ ID NO: 5421 - DNA, 966 bp, Alloiococcus otitidis
  CDS (13)..(963)
aggagaatcctaatggaaagcattcaagatcagctagccaagttgatgaatccccgtcgattaaaccaaaaataccaggaaatattaaaggaaaaggtcttcaaggatcctgatgtcaaagcttttttagaggccaaccgaaagaatttagacacagaagcggttttaaagtctgcttcaaagttatatgaattcgtccaggaaaaaaaacggtttaaggctgaccaaacagctggggctgagagcgtggtccggggccactatcccaagctggtccttcacaacaagcgaattttagtggagtatgtccctagtcaggaagagcttgaccgccagaaaaaacaggccagtcaaaaccggctcaaaacctactatatcgataaggaagtccaagaggctaactttgacgacctcttttataaccaggataaagtgaaggctatagaaaaagtaattgacttcctggaagcttacaaggctgaccctaaagacttccaccaaggcctttacctctatgggtcttttggggttggcaagacctatctcttgggagccatggccaaaactttaaccgagctgggttttgaagtgtccatggtttacttcccgagttttacttccgatatgaagtcggcgataggggataatacggttaatgacaagttggatgctattcaaaatacggaaattttaatcattgacgatattggggctgagtctatgtctgcctggttgcgggatgatatcttaggcgttattctccagtaccggatgcaacacaatttatctaccttctttacctctaacatttccatgaaacagttggaagaagaacacttggcccaggtcaggggagggagtgaaccggtcaaggctgcccgtttgatggaacgggtccgctacttggctgaagaggtagagatgactgggaccaaccaaagacacaagtcaataaacaaaaattaa

SEQ ID NO: 5422 - protein, 317 aa, Alloiococcus otitidis
MESIQDQLAKLMNPRRLNQKYQEILKEKVFKDPDVKAFLEANRKNLDTEAVLKSASKLYEFVQEKKRFKADQTAGAESVVRGHYPKLVLHNKRILVEYVPSQEELDRQKKQASQNRLKTYYIDKEVQEANFDDLFYNQDKVKAIEKVIDFLEAYKADPKDFHQGLYLYGSFGVGKTYLLGAMAKTLTELGFEVSMVYFPSFTSDMKSAIGDNTVNDKLDAIQNTEILIIDDIGAESMSAWLRDDILGVILQYRMQHNLSTFFTSNISMKQLEEEHLAQVRGGSEPVKAARLMERVRYLAEEVEMTGTNQRHKSINKN

SEQ ID NO: 5423 - DNA, 945 bp, Alloiococcus otitidis
  CDS (142)..(942)
cttgaggtcaaaagagggttatcaaaatattaccaagtcctttttggatgtttaccaggtcaacccaaacaaggggatgtcaaggctccaagttcaaccagcccagaagatcatcccgacttttcgctaagtcaggctgatatgacaagctttgactgggacttcctccaagaagggctgagtaagcagttagttagccatgattttttaagcgaggatatcaaagaaatcatccgtatctaccaccttacttacggctttaatgaactggaggtccgccaggctgtcctagaagcagctgacctggaaacgggccaagtagaagcagagtctttacaaaaggttttgaaccgccaagtcaaccggctaggcaaggccaaccagctgcaagcccagcttgtttcagaccaaggtcacgaccaggataaggacaggaagggcggttcagtggcaggagacccagttcaggaaatcattgatgtggctaagtccatgtcgccgtatgactacttaaaatccatcaaagaccaacgccatgggattgtttcttcttcagagaagtggttaatcaaggaattaatggactatgccaaatttcctaaagaggttttgaatattttaatccactatatcctagtcgtgaaaaacaatacccaggtcagtaagaattttgccttgaaaattgctgatgactgggcccaaaaaggggtgaccagcgctgaagatgccctagaagtgatcaagggccgctatttaaaccggcaaaaaaaccgccagtccaagagaaaatcctggtctaaaccatctaaaagaatgggtaagcaagaaagccggcctgcttggatggcccagcccaaccgtcagtcgccagaaagtgacccagaccaagaaagtgatatgaggtcccggctcaaggatattatgaaccgtgaaggagaatcctaa

SEQ ID NO: 5424 - protein, 267 aa, Alloiococcus otitidis
MTSFDWDFLQEGLSKQLVSHDFLSEDIKEIIRIYHLTYGFNELEVRQAVLEAADLETGQVEAESLQKVLNRQVNRLGKANQLQAQLVSDQGHDQDKDRKGGSVAGDPVQEIIDVAKSMSPYDYLKSIKDQRHGIVSSSEKWLIKELMDYAKFPKEVLNILIHYILVVKNNTQVSKNFALKIADDWAQKGVTSAEDALEVIKGRYLNRQKNRQSKRKSWSKPSKRMGKQESRPAWMAQPNRQSPESDPDQESDMRSRLKDIMNREGES

SEQ ID NO: 5425 - DNA, 594 bp, Alloiococcus otitidis
  CDS (127)..(591)
aagacaagaaaaagtaagcaaaggagactaagtgtggcgtatccgtggcaaggactggatccgaaagactatattactattgaagccagccaggccatttccgaccaagatgtgaccctggtgaccatggtctacaaacccatcatcaaggctgatgctttttccctttatttaactttgaaatcttatatagacaaggctagcctggaccaggctgacctcctccagtctcgacttctggctgaacttggacttgggctagcggacttttaccaggctcgggttcgacttgaagctatggggctcttgtcggtttacaaaaatcaaatgaaggattatatctacaccctccatccccccttgtctgctactagcttttttaatgagcccttgctctgtgtcctccttaaggatgctgttggggacaaggtatttgcttcctaccggtctcgcctgttacctgacttgaggtcaaaagagggttatcaaaatattaccaagtcctttttggatgtttaccaggtcaacccaaacaaggggatgtcaaggctccaagttcaaccagcccagaagatcatcccgacttttcgctaa

SEQ ID NO: 5426 - protein, 155 aa, Alloiococcus otitidis
MVYKPIIKADAFSLYLTLKSYIDKASLDQADLLQSRLLAELGLGLADFYQARVRLEAMGLLSVYKNQMKDYIYTLHPPLSATSFFNEPLLCVLLKDAVGDKVFASYRSRLLPDLRSKEGYQNITKSFLDVYQVNPNKGMSRLQVQPAQKIIPTFR

SEQ ID NO: 5427 - DNA, 594 bp, Alloiococcus otitidis; identical to SEQ ID NO: 5425
  CDS (34)..(591)

SEQ ID NO: 5428 - protein, 186 aa, Alloiococcus otitidis
MAYPWQGLDPKDYITIEASQAISDQDVTLVTMVYKPIIKADAFSLYLTLKSYIDKASLDQADLLQSRLLAELGLGLADFYQARVRLEAMGLLSVYKNQMKDYIYTLHPPLSATSFFNEPLLCVLLKDAVGDKVFASYRSRLLPDLRSKEGYQNITKSFLDVYQVNPNKGMSRLQVQPAQKIIPTFR

SEQ ID NO: 5429 - DNA, 471 bp, Alloiococcus otitidis
  CDS (13)..(468)
agggtggttcaaatgttatgcccaagatgtaaccataatggcactaaggtaatcgacagtcgcccggcagatgagggtaaggctattcggaggcggcgggagtgtgaagagtgtggctttcgttttacgacctttgaacggcaagagcagtcggctattctagttgttaagaaaaatggtaatcgggaagaattttcccgggaaaaattactgagggggattcggcgggcttgtgaaaaacgacccatctctgctgaggaccaagaggcgattgtctctcatgttgaacgtcaggtacgggaccagggtgtcagtgagatcgactcaactgaaattggcaactatgtcatggacgagttagcccagaccgatgatgtggcttatatccgttttgctagtgtctatcgagaatttaaagatattgacgttttcttagaagagatgaaggccttagaagacaagaaaaagtaa

SEQ ID NO: 5430 - protein, 152 aa, Alloiococcus otitidis
MLCPRCNHNGTKVIDSRPADEGKAIRRRRECEECGFRFTTFERQEQSAILVVKKNGNREEFSREKLLRGIRRACEKRPISAEDQEAIVSHVERQVRDQGVSEIDSTEIGNYVMDELAQTDDVAYIRFASVYREFKDIDVFLEEMKALEDKKK

SEQ ID NO: 5431 - DNA, 471 bp, Alloiococcus otitidis; identical to SEQ ID NO: 5429
  CDS (4)..(468)

SEQ ID NO: 5432 - protein, 155 aa, Alloiococcus otitidis
MVQMLCPRCNHNGTKVIDSRPADEGKAIRRRRECEECGFRFTTFERQEQSAILVVKKNGNREEFSREKLLRGIRRACEKRPISAEDQEAIVSHVERQVRDQGVSEIDSTEIGNYVMDELAQTDDVAYIRFASVYREFKDIDVFLEEMKALEDKKK

SEQ ID NO: 5433 - DNA, 666 bp, Alloiococcus otitidis
  CDS (1)..(663)
atggtagggggactcatttttgtcctcactgccagcaataaaaggaaaggaagtttgtccatgacctatttgttaggcctaaccggtggcattgccagtgggaagtctactgttagccaggtttttaaggaaaagggtatccaagtggttgatgctgaccgagttgcccgacaggttgttgaacctggaagtccaggcttagaccagcttgttgattattttggccaggagattttgacccaggatgggggcttggaccgcaaatatttaggcgaccttatcttccggaatagccaggccaaggaggctgtcaaccggatcctccaccctttgattaggcagtctatccaaaatcaaattaaaactgccataggccaagacttggatttgttagttttagacatccccctcctttacgagacaggtcaggcagacgactaccaggccgtcatggtggtttcgcttccctaccaggaccaggtgagtcggttaatggaccgggatgggattgaccgagaccaagccctgcgcaagattcaggcccaaatgtcattggaagaaaaagtgaagttggcggactatgtcattgataacagcggaagcaaggaagaaagccgtcagcaggttgaagcttggttggatcaaaagggttttaaaaacttgtaa

SEQ ID NO: 5434 - protein, 221 aa, Alloiococcus otitidis
MVGGLIFVLTASNKRKGSLSMTYLLGLTGGIASGKSTVSQVFKEKGIQVVDADRVARQVVEPGSPGLDQLVDYFGQEILTQDGGLDRKYLGDLIFRNSQAKEAVNRILHPLIRQSIQNQIKTAIGQDLDLLVLDIPLLYETGQADDYQAVMVVSLPYQDQVSRLMDRDGIDRDQALRKIQAQMSLEEKVKLADYVIDNSGSKEESRQQVEAWLDQKGFKNL

SEQ ID NO: 5435 - DNA, 855 bp, Alloiococcus otitidis
  CDS (259)..(852)
atcgtttttgaattagaaagaggtcatcacttgccagaactacctgaagttgaatcagtccgccgtggcttggaggcccaagtggtgggcaagaccatccaggaggtccaagtctactgggacaatattattgaatcccctaaaccagtctcccagtttaaaagaaggctcctaggtcagaccatccaccaggtcaagcgtcggggcaagctcctcttgttttacctggaccaagatgtgttgatttctcatttgaggatggagggcaagtatggcctcctagaccaagacgctcctctcaccaagcacagccatgttatctttaactttcgtgatgggactcaattgcggtatgaagatgtccgcaagtttggccggatgagtttagttgaaaaaggtaaggaagcccagcacaagtccctagcccagttagggccggaaccaacttttgaagacttgaccctggagtggatgcttacttttttggcccataagaccagggctatcaagtcgattttactagaccaaaaactcctagtgggagtgggcaatatttacgctgatgagatcttgtttcaagcccgaatccaaccagaccggccaggtgggtcgctgactaatgaagaagtggaagcccttcgccaagcagccatcaagattctccaagaggctaccttaagaggggggtccacagtccggtcctataaaaattccctgggtcaggctgggacctaccaggacttccaccaagtttatggtaaggaaggagacccttgcccgcgctgctatcaaccgattaaaaagatcaagttaaatggtagggggactcatttttgtcctcactgccagcaataa

SEQ ID NO: 5436 - protein, 198 aa, Alloiococcus otitidis
MEGKYGLLDQDAPLTKHSHVIFNFRDGTQLRYEDVRKFGRMSLVEKGKEAQHKSLAQLGPEPTFEDLTLEWMLTFLAHKTRAIKSILLDQKLLVGVGNIYADEILFQARIQPDRPGGSLTNEEVEALRQAAIKILQEATLRGGSTVRSYKNSLGQAGTYQDFHQVYGKEGDPCPRCYQPIKKIKLNGRGTHFCPHCQQ

SEQ ID NO: 5437 - DNA, 855 bp, Alloiococcus otitidis; identical to SEQ ID NO: 5435
  CDS (82)..(852)

SEQ ID NO: 5438 - protein, 257 aa, Alloiococcus otitidis
MVGKTIQEVQVYWDNIIESPKPVSQFKRRLLGQTIHQVKRRGKLLLFYLDQDVLISHLRMEGKYGLLDQDAPLTKHSHVIFNFRDGTQLRYEDVRKFGRMSLVEKGKEAQHKSLAQLGPEPTFEDLTLEWMLTFLAHKTRAIKSILLDQKLLVGVGNIYADEILFQARIQPDRPGGSLTNEEVEALRQAAIKILQEATLRGGSTVRSYKNSLGQAGTYQDFHQVYGKEGDPCPRCYQPIKKIKLNGRGTHFCPHCQQ

SEQ ID NO: 5439 - DNA, 855 bp, Alloiococcus otitidis; identical to SEQ ID NO: 5435
  CDS (31)..(852)

SEQ ID NO: 5440 - protein, 274 aa, Alloiococcus otitidis
MPELPEVESVRRGLEAQVVGKTIQEVQVYWDNIIESPKPVSQFKRRLLGQTIHQVKRRGKLLLFYLDQDVLISHLRMEGKYGLLDQDAPLTKHSHVIFNFRDGTQLRYEDVRKFGRMSLVEKGKEAQHKSLAQLGPEPTFEDLTLEWMLTFLAHKTRAIKSILLDQKLLVGVGNIYADEILFQARIQPDRPGGSLTNEEVEALRQAAIKILQEATLRGGSTVRSYKNSLGQAGTYQDFHQVYGKEGDPCPRCYQPIKKIKLNGRGTHFCPHCQQ

SEQ ID NO: 5441 - DNA, 2679 bp, Alloiococcus otitidis
  CDS (16)..(2676)
aggagattagagaccatgtctaaaaagaaagtcctgttgatcgatggctacagtgttgcctttagagccttttatggcttacacggccagttggaatccatgaaaaaccgcaacggcctccatactaacgctatttttggcttccacaatatgctagagagtattatggaaaaagaagaccccagccatgtcctagtcgccttcgatgccggcaagaccaccttcagacacgactattatgaagactacaagggtggtcgggaaggcatgcccagtgagttttccgagcaggttccttacttaaaagaattggtccaggcctttgggattcagacctaccaactggaccaatacgaagctgatgatattattgggaccctgacgactcggcttgaggaccaggatgacctggaagtagtggtcttgacaggggaccgggacttgatgcaactagctactgacaaggtccggatcgcccttaccaaaaaaggggtatcggacgttaaggactataccgctggacgcatacaagaggaattgggaattgaacccaaacaaattattgacatgaagggcttggctggtgacagctcagataatatcccaggtgtcacccggattggggaaaaaacagccattaaattactaaaaaaataccattcggttgaagaactttacgaccggatcgacgagatgaacaagtccaagcggaaagactacctaatagacgaaaaagagacagcctacttgagtaaaaagctggccaccattgatgttcactcccccatcgaagtagacctggctgatttggcctattccggcaaggacttggaaaagctggttcccttttacagggagatggactttaatagccagctggataaactgaacttggaaggggacttgccagacctgaaagaccaagaagaccaggtagactttacttatgtcaccgagatcaaccaagacatgcttagtcagtctgcttcgatttacttggagattttagaagaagactatctccgagccgacctccaagccattgcctgggggagtgaggcaggaatttacgtgacagacccagacacggccctccagtcagatatgtttagagactggcttgagaatcctgatgtcagcttgaatacctatgatgccaaggcccttattgccctcttaaaccggtcgggcatccaggtaggccatattgcctttgacattatgctagcctcctacctcttaacctctgaagatgccagcgggggcaacctctatgatcttgccagcaagcacaactacaccggtgtcctgtctgatgtggtggtctatggcaagggtaaaagcaaggggatcccggatgacttggaccagatgtatgcccacttagccagcaaggtcaaagctattatggacttgactgaccaattgaccgaagagctccacgacaaagaccaagacaagctttattatgaaattgaacttcccttggccaaggtcctggctgatatggagatccaaggcattaagttggatattgaccggctggaagcgatgaaggaagaattctcagaccggttaaaagaaattgaggctaaaatttttgacgaggctggggaagaatttaacattaattcacccaagcaactctcccatatcctttttgaaaagatgggttacccggttatcaaaaaaaccaagaccggctactctactgcccaggatgttttagaaaaacttagaagccaggccccaattgtggaatacattctccagtaccggactattgctaaaatccagtccacttatgttcaaggcttgatcaacgatgcggaccccgacactcacaaggtccatacccgctaccagcaaacagtggcccggactggacgattgagttcggtcgatcctaacctgcaaaatattcccatcaggaccgaagaagggagtaagatccgcaaggcctttgtcccaagaaaagaaggttggcagatctttgcggccgactactcgcaaattgaactccgggtcctagcccacatgtcccaagaccaagagttgatcaaggcctacctaaataacgaagacatccacacagcaaccgccctacaaatctttggcttggacagcccggatgaggtgacaggcaatatgcgacgggaggccaaggcagtcaattttgggattgtttatgggatttccgactacggcctgtcgcaaaacctaaatatttcccgtaaggaagccaaaaattatattgacacctactttagccggtttcctggagttaaggactatatcgaccagtccattcgcgaagccaaggacaagggctatgtggcgacgatttttaaccgccgtcgttacctgccggacatcaattcccgcaactttaacttgcggtcctttgcagagagaacggccatgaatacccccatccaggggagtgccgctgatattatcaaggtagccatgatccaaatggcccagcggattgaagaggaaggcttagaggcgaccatgctcttgcaggttcatgacgaattaatctttgaagcgcctgaagccgaactggaaacattagaaaaattggttagccaggtcatggaagaggcggttgacttggatgtgccgctcaaggtagattccaattccggcccaacctggtttgaagctaaataa

SEQ ID NO: 5442 - protein, 887 aa, Alloiococcus otitidis
MSKKKVLLIDGYSVAFRAFYGLHGQLESMKNRNGLHTNAIFGFHNMLESIMEKEDPSHVLVAFDAGKTTFRHDYYEDYKGGREGMPSEFSEQVPYLKELVQAFGIQTYQLDQYEADDIIGTLTTRLEDQDDLEVVVLTGDRDLMQLATDKVRIALTKKGVSDVKDYTAGRIQEELGIEPKQIIDMKGLAGDSSDNIPGVTRIGEKTAIKLLKKYHSVEELYDRIDEMNKSKRKDYLIDEKETAYLSKKLATIDVHSPIEVDLADLAYSGKDLEKLVPFYREMDFNSQLDKLNLEGDLPDLKDQEDQVDFTYVTEINQDMLSQSASIYLEILEEDYLRADLQAIAWGSEAGIYVTDPDTALQSDMFRDWLENPDVSLNTYDAKALIALLNRSGIQVGHIAFDIMLASYLLTSEDASGGNLYDLASKHNYTGVLSDVVVYGKGKSKGIPDDLDQMYAHLASKVKAIMDLTDQLTEELHDKDQDKLYYEIELPLAKVLADMEIQGIKLDIDRLEAMKEEFSDRLKEIEAKIFDEAGEEFNINSPKQLSHILFEKMGYPVIKKTKTGYSTAQDVLEKLRSQAPIVEYILQYRTIAKIQSTYVQGLINDADPDTHKVHTRYQQTVARTGRLSSVDPNLQNIPIRTEEGSKIRKAFVPRKEGWQIFAADYSQIELRVLAHMSQDQELIKAYLNNEDIHTATALQIFGLDSPDEVTGNMRREAKAVNFGIVYGISDYGLSQNLNISRKEAKNYIDTYFSRFPGVKDYIDQSIREAKDKGYVATIFNRRRYLPDINSRNFNLRSFAERTAMNTPIQGSAADIIKVAMIQMAQRIEEEGLEATMLLQVHDELIFEAPEAELETLEKLVSQVMEEAVDLDVPLKVDSNSGPTWFEAK

SEQ ID NO: 5443 - DNA, 1335 bp, Alloiococcus otitidis
  CDS (4)..(1332)
ggtatggaccaagacaccatctatcactttgttggcattaaaggatctggcatgagttcacttgccactatcttgtttgacaagggcttaaatgtccaaggatctgatgtcaaaaagtatttctttacccaaaaaagcttagaagaaaaaaatataaacattttagaatttgaccctgataacatcaaaccaggtatgaccctgatagcaggcaatgcctttggagacaaccatcccgagctggtccgaggtcgagagctcggtttagaaatcatccgctaccatgattttatcggtgaccttatcgaacactttacttccatcgctattaccgggtctcacggtaagacctccacaactggtttgatggcccatgttttctccggtattgatagcacctcctacttaattggagatgggaccggccatggggaaaaaggtgccaagtattttgtcttggaagcctgcgaatacaagcggcactttttggcctaccgaccggactatgcggttatgaccaatattgactttgaccacccggactattacaagtctattgaagatgtccaagtggcctttgatgaattcagccaccaggtcaaaaaatacctctttgcctgcggggacgaccaacgtcttcggcaggtcaaagcccaggtgccggtcatttactacggtctaaatgaagacaatgactttgtggctaaaaacatcgaccgaagtcgtgaagggtctgccttcgacctttatattaagggagaattttacaaacacttcaccatcccaacctatggcaaccacaatattcaaaatgccttggcggttatagcagtagcttactacgaagggttagaccaagatttggttgcccaaagattggctaattttgctggggtgaaacgccggtttaccgagaaggtggtcggggacactactattatcgatgactatgctcaccaccctgctgaaataagggcaacgattgatgcggcccggcaaaaatacccggacaaggacattgtgacggtcttccagccccacacctttacccggacagtcgccctcctagatgaatttgcccaggccttggacttggcagaccaggtttacttgtgtgatatctttaattcagctagagaaaagtcaggcgatatttccatccaagatcttttggctaaaaccagcaaggccgaccaggtgattgaggaagacgatgtgtctcctctgcttgaccaacatgggcaagtgattattttcatgggagcaggagacatcagcaagtttgaaaaagcctatgaaagcttgttgagctcaacctaccactcccaggtctaa

SEQ ID NO: 5444 - protein, 443 aa, Alloiococcus otitidis
MDQDTIYHFVGIKGSGMSSLATILFDKGLNVQGSDVKKYFFTQKSLEEKNINILEFDPDNIKPGMTLIAGNAFGDNHPELVRGRELGLEIIRYHDFIGDLIEHFTSIAITGSHGKTSTTGLMAHVFSGIDSTSYLIGDGTGHGEKGAKYFVLEACEYKRHFLAYRPDYAVMTNIDFDHPDYYKSIEDVQVAFDEFSHQVKKYLFACGDDQRLRQVKAQVPVIYYGLNEDNDFVAKNIDRSREGSAFDLYIKGEFYKHFTIPTYGNHNIQNALAVIAVAYYEGLDQDLVAQRLANFAGVKRRFTEKVVGDTTIIDDYAHHPAEIRATIDAARQKYPDKDIVTVFQPHTFTRTVALLDEFAQALDLADQVYLCDIFNSAREKSGDISIQDLLAKTSKADQVIEEDDVSPLLDQHGQVIIFMGAGDISKFEKAYESLLSSTYHSQV

SEQ ID NO: 5445 - DNA, 522 bp, Alloiococcus otitidis
  CDS (361)..(519)
attttaaaaggggatgacaaaatgaattacgacggcccctccttcaaccatcgaaagaaaaagcaagtagaaagtccagaacctagacctagtcaagacaccggcttttttaagtctggtcgcaaaaaagacccaaaagaaggtctgaactttgccaatattaaccagagagacaaggacctagctcgtgacctccacaaggaccctagccaggaaaatgaagccgagaaaatcctcaagggtaagtctaagttcaaccagctttacgaacacaagcagtcgcaaaaataccggccccggtttaaggtgactgaagttccttccccagtttttggctatagcaaggaacagaaagagcggatgggctacgataagcaagaggttcaggaagaaattgagtggaattacaaggccttaaaagacttgatgttaaaacaagaccatgactttctcctgaccgaagactgtttaaatgccaatatccttaaaaaatggcagacagaccaaaaagctgactcttag

SEQ ID NO: 5446 - protein, 53 aa, Alloiococcus otitidis
MGYDKQEVQEEIEWNYKALKDLMLKQDHDFLLTEDCLNANILKKWQTDQKADS

SEQ ID NO: 5447 - DNA, 522 bp, Alloiococcus otitidis; identical to SEQ ID NO: 5445
  CDS (22)..(519)

SEQ ID NO: 5448 - protein, 166 aa, Alloiococcus otitidis
MNYDGPSFNHRKKKQVESPEPRPSQDTGFFKSGRKKDPKEGLNFANINQRDKDLARDLHKDPSQENEAEKILKGKSKFNQLYEHKQSQKYRPRFKVTEVPSPVFGYSKEQKERMGYDKQEVQEEIEWNYKALKDLMLKQDHDFLLTEDCLNANILKKWQTDQKADS

SEQ ID NO: 5449 - DNA, 654 bp, Alloiococcus otitidis
  CDS (46)..(651)
ccgaactaccttgaacaccctaatgaacaaataaaggagatttgcatgctagtaacagcctataacaataagagtttaaaagatgtcttaatggtcatgctggaagaatccaaggctagtgaccaaagctatgaacggtccaatgacctggccgctatctataaccaaaaaagtggcaaattggtagcctacaacttctttaatatttccaaccacttaaacttggacgaagacggcccagttagcttaagccaagaccaggtagaccaattgaaccaactgatcaaagaagctggttttgaccagaccctccaggcagacctggaccctaaatttgttgttggttacgttaaagaatgcaaggaccatgaagattccgaccacctccatatcacccaagtagaagtggaccagggccaaagcctgcaaattgtctgtggagctagcaatattgcccaaggccaaaaggttgttgtagccaaaccaggggctatgatgccggatggaagtgtgatttggccgggcaagttacgcggggttgacagttttgggatgatttgctcagcccgagaattgaatattaaatcaaaccaaaagcaaggcattctagtcttagctgatgacaaaccgactggagaaagctttgaattttaa

SEQ ID NO: 5450 - protein, 202 aa, Alloiococcus otitidis
MLVTAYNNKSLKDVLMVMLEESKASDQSYERSNDLAAIYNQKSGKLVAYNFFNISNHLNLDEDGPVSLSQDQVDQLNQLIKEAGFDQTLQADLDPKFVVGYVKECKDHEDSDHLHITQVEVDQGQSLQIVCGASNIAQGQKVVVAKPGAMMPDGSVIWPGKLRGVDSFGMICSARELNIKSNQKQGILVLADDKPTGESFEF

SEQ ID NO: 5451 - DNA, 1083 bp, Alloiococcus otitidis
  CDS (10)..(1080)
ccatttgttatggacgaaaaattatttaaccgcattaaaaaaataactgaaatccaagccactgctggctttgagtatcagatgagagattacctgaaagacgaactgaaggataaagtcgatagaattgagatggacggcttaggcggggttttcggcattaaggcgagtcaggaagaccaggctccccggctcatgctagcggcccacatggacgaagtgggctttatcttggctaagatccaagcaaacggcctcttacaagtccgaccccttggtggctggaatcccaatgtggtctcttcccagcgctttagtctgcagactgaccagggcgacctaccaatcgtatccgcttccattccaccccacctgttaaaaaataagtctggttcagcgagtttgaacttagaagatatcttatttgatgggggctttacttccaaggaagaggcggaaagttacggtgtccggcccggccaagctatcgttccagatgtccaaactatccccttggctaatggcaagaccattcttggcaaggcatgggataaccgctttggtgttttagccataatcgatgccctagaggaagtgggcgaccaaaccttagctaataccttgatcgccggggccaatgttcaggaagaagttggcttaagagggacaaagggttcggtccggaaattcaagccggactgcttttttgctgtcgatgcttctccagccgaggataccagtggtcaagcggatgctaatggccggcttggggacggagtattaatccgtatccaagatccaggctacatcatgccaaaagagataaaagattttatcctagacactgccgaaagtcatgacattccctaccagtactttgtctctaaagggggaacagatgcggtagctgcccaccagcttaacgacgggatcccgtctggtgtcttaggcgttcctgtccgctaccctcacacccaccagtccctcttccacattgacgactactatgcagccaaagacctgctcgtccaactgattaagaactttgaccgaactaccttgaacaccctaatgaacaaataa

SEQ ID NO: 5452 - protein, 357 aa, Alloiococcus otitidis
MDEKLFNRIKKITEIQATAGFEYQMRDYLKDELKDKVDRIEMDGLGGVFGIKASQEDQAPRLMLAAHMDEVGFILAKIQANGLLQVRPLGGWNPNVVSSQRFSLQTDQGDLPIVSASIPPHLLKNKSGSASLNLEDILFDGGFTSKEEAESYGVRPGQAIVPDVQTIPLANGKTILGKAWDNRFGVLAIIDALEEVGDQTLANTLIAGANVQEEVGLRGTKGSVRKFKPDCFFAVDASPAEDTSGQADANGRLGDGVLIRIQDPGYIMPKEIKDFILDTAESHDIPYQYFVSKGGTDAVAAHQLNDGIPSGVLGVPVRYPHTHQSLFHIDDYYAAKDLLVQLIKNFDRTTLNTLMNK

SEQ ID NO: 5453 - DNA, 333 bp, Alloiococcus otitidis
  CDS (1)..(330)
atgaatgaaaaaaaccagtccttattctgggtagttgtggccagtattttaagcctaggcctcttcttattcctctttttcctctaccaagaccgcaaaatgatgtcaagttcggctgtcttgaaaaatgccaaaaaatcttttaaaaaagatgggccaatcgaaggttcctggatccaaatgaccccatctacttacaaagttgatactgaagaaagtccagtctactatgggggtatcacccgcaaggtagaccaaaacatccagcaatatgaatttatagccgatgcctacactggccaaattattaccacctatcctatagcttcttaa

SEQ ID NO: 5454 - protein, 110 aa, Alloiococcus otitidis
MNEKNQSLFWVVVASILSLGLFLFLFFLYQDRKMMSSSAVLKNAKKSFKKDGPIEGSWIQMTPSTYKVDTEESPVYYGGITRKVDQNIQQYEFIADAYTGQIITTYPIAS

SEQ ID NO: 5455 - DNA, 663 bp, Alloiococcus otitidis
  CDS (16)..(660)
tggaagggaggacttatgatgagactcagacacaaagcttgggcagctgactatatcaaagaacacacagactatgtcctgcctaaccctatggctctgaaagggaagtggcaggacgtttttgaccaagccggccccatccatattgaactgggtatgggcaagggacagtttattgtagaagcggccaagcaaaacccagacatcaactatattgggattgaacaacaaaccagcgtgatagtttcggctttagaaaagcaggttgacttggacttgcccaatttaaaatttttgaatgaaaacggccaggacctgacccatttttttgaccagggagaagttgaccggatttacctgactttctctgatccttggccaaaaaaccggcacgaaaaacgccggctgacctataagagctttctagctatttatgaccaggtcttagatgaatcaggtagcctccattttaaaacagacaaccggggcctttttgaatattccctggtcagtttttcccactatggcatggtcttagaccaagtctacttagacttgcaccagtctgactttgtgggcaatattatgactgaatacgaagaaaagttttccgctaaaggccaacccatctaccgggtccacgcccactttcccaaagaatag

SEQ ID NO: 5456 - protein, 215 aa, Alloiococcus otitidis
MMRLRHKAWAADYIKEHTDYVLPNPMALKGKWQDVFDQAGPIHIELGMGKGQFIVEAAKQNPDINYIGIEQQTSVIVSALEKQVDLDLPNLKFLNENGQDLTHFFDQGEVDRIYLTFSDPWPKNRHEKRRLTYKSFLAIYDQVLDESGSLHFKTDNRGLFEYSLVSFSHYGMVLDQVYLDLHQSDFVGNIMTEYEEKFSAKGQPIYRVHAHFPKE

SEQ ID NO: 5457 - DNA, 819 bp, Alloiococcus otitidis
  CDS (22)..(816)
gaaaaaaggggttgggttaaaatggcgattgaaagagaaatggggtggaccttacaccccttaaaaggcgaaacaggaaaggcttatatgggaaccaaggatgagcagaagttattctttaagaagaatacctcaccctttctggcagccctgtccatggaagggatagctcctaagttggtatggacccgacggatgggcaatggcgatgtcctaaccgcccaagaatggtgcaagggtcggaccttgaccaaagaggaaatgaaattggctgaggtcccccataaattacaccgggtccaccagtccaaaaccttgaagaagatgcttcaacaagttgatggcagttacttgaagccgggtgacttgcttgaccaatttttacaggggctagccagtgacttagagtctcatccaactattcaagagggtttagcctacttacagtcccaggcaagtagccagctagataaagaggacttagtggtttgccacggggatgcctcccataaaaattggcttttgtcggattttgatgacctctacctagttgattgggactcggtcatcctcgctgacccggcctatgacttaggccagtatggtgcccgctattggcagtatttagactgggaggactggcttaatcattaccaagccaagcttagttcgtcctttaaaaggagaatctactggtaccaggtcatagcagccctcttagatatcaaagtcttttatgaaaaacggcggatgccagccatgaaccatggaatcaaatccttggcccaaatgttaacaatagggccagagggaaactaa

SEQ ID NO: 5458 - protein, 265 aa, Alloiococcus otitidis
MAIEREMGWTLHPLKGETGKAYMGTKDEQKLFFKKNTSPFLAALSMEGIAPKLVWTRRMGNGDVLTAQEWCKGRTLTKEEMKLAEVPHKLHRVHQSKTLKKMLQQVDGSYLKPGDLLDQFLQGLASDLESHPTIQEGLAYLQSQASSQLDKEDLVVCHGDASHKNWLLSDFDDLYLVDWDSVILADPAYDLGQYGARYWQYLDWEDWLNHYQAKLSSSFKRRIYWYQVIAALLDIKVFYEKRRMPAMNHGIKSLAQMLTIGPEGN

SEQ ID NO: 5459 - DNA, 1242 bp, Alloiococcus otitidis
  CDS (907)..(1239)
tggcgcaaacttaccacccagaaggggggcttgatagcggtgcttaaagacctcttagacaaacgacggagtaattttcacagccaagtcgccaaatacctccgccttctttttaatgaccagtttaccatccttctcttatttttggtgggggcaggaggctttttataccgggaagtcttagatagcctcaagcctggtttattagtgggacaggtcttgaccgcccttatcttaactttccttttggtatggggccggattgctagctatatgcaaaatgctgaccgcctcttctttttgcccagaattgaagaattgaagcccagtctgcgggcctatgcctggcagtccctcctctttaaagtcctgcttttaattctggctatctttttattgggacctttaattgcagggctaacgggctaccaagtgcctgaactggctgtgattggcctccaggtcctcgtcctccagctggactggacctacttaagcttccagaagaaagtgacagtcagaagactctacctggcccggttgaccggggctttagccgtcttaagctttgtccttattctgaccaactttatttttaaccccttcctggttagccttgccagtttaattgttgctatccttttttactttttagtcaaccaggtcaaggggcctgactttatcttaatcgagcaggtcatccgggaagaaaacaagcggattcagactatctaccgcttttttaacctcgttaccgatgtgccccaagtccaagatgacggaaaaaaacggtaccacttgcctcgcttggttgccttttttgaagggaaagagggggaccaggcctccttcttactggcccgtatctttgtccgccaacctggctaccgcaaccttcttattcgtttgattttagttggcggtcttctcattgttttgtctagtaatatggcctttgccttgatttttgctggcctttttatcctcatggccctctaccaactcacccccatcctagacgacttaaaccagacagcttacttaaaactcctccccctttcccaagcagacctagccactgccttgcgcaaattcttaaccaagctagctgtctttgtggttgtcatctttactttgttggggcttttcacttctatcagccaggctttggccatccttgtcttgacttctgccttggcttgggcctttatccaagtttacttgaaaagaaaatatgagtag

SEQ ID NO: 5460 - protein, 111 aa, Alloiococcus otitidis
MILVGGLLIVLSSNMAFALIFAGLFILMALYQLTPILDDLNQTAYLKLLPLSQADLATALRKFLTKLAVFVVVIFTLLGLFTSISQALAILVLTSALAWAFIQVYLKRKYE

SEQ ID NO: 5461 - DNA, 1242 bp, Alloiococcus otitidis; identical to SEQ ID NO: 5459
  CDS (541)..(1239)

SEQ ID NO: 5462 - protein, 233 aa, Alloiococcus otitidis
MTGALAVLSFVLILTNFIFNPFLVSLASLIVAILFYFLVNQVKGPDFILIEQVIREENKRIQTIYRFFNLVTDVPQVQDDGKKRYHLPRLVAFFEGKEGDQASFLLARIFVRQPGYRNLLIRLILVGGLLIVLSSNMAFALIFAGLFILMALYQLTPILDDLNQTAYLKLLPLSQADLATALRKFLTKLAVFVVVIFTLLGLFTSISQALAILVLTSALAWAFIQVYLKRKYE

SEQ ID NO: 5463 - DNA, 1242 bp, Alloiococcus otitidis; identical to SEQ ID NO: 5459
  CDS (511)..(1239)

SEQ ID NO: 5464 - protein, 243 aa, Alloiococcus otitidis
MTVRRLYLARLTGALAVLSFVLILTNFIFNPFLVSLASLIVAILFYFLVNQVKGPDFILIEQVIREENKRIQTIYRFFNLVTDVPQVQDDGKKRYHLPRLVAFFEGKEGDQASFLLARIFVRQPGYRNLLIRLILVGGLLIVLSSNMAFALIFAGLFILMALYQLTPILDDLNQTAYLKLLPLSQADLATALRKFLTKLAVFVVVIFTLLGLFTSISQALAILVLTSALAWAFIQVYLKRKYE

SEQ ID NO: 5465 - DNA, 1242 bp, Alloiococcus otitidis; identical to SEQ ID NO: 5459
  CDS (319)..(1239)

SEQ ID NO: 5466 - protein, 307 aa, Alloiococcus otitidis
MKPSLRAYAWQSLLFKVLLLILAIFLLGPLIAGLTGYQVPELAVIGLQVLVLQLDWTYLSFQKKVTVRRLYLARLTGALAVLSFVLILTNFIFNPFLVSLASLIVAILFYFLVNQVKGPDFILIEQVIREENKRIQTIYRFFNLVTDVPQVQDDGKKRYHLPRLVAFFEGKEGDQASFLLARIFVRQPGYRNLLIRLILVGGLLIVLSSNMAFALIFAGLFILMALYQLTPILDDLNQTAYLKLLPLSQADLATALRKFLTKLAVFVVVIFTLLGLFTSISQALAILVLTSALAWAFIQVYLKRKYE

SEQ ID NO: 5467 - DNA, 1242 bp, Alloiococcus otitidis; identical to SEQ ID NO: 5459
  CDS (274)..(1239)

SEQ ID NO: 5468 - protein, 322 aa, Alloiococcus otitidis
MQNADRLFFLPRIEELKPSLRAYAWQSLLFKVLLLILAIFLLGPLIAGLTGYQVPELAVIGLQVLVLQLDWTYLSFQKKVTVRRLYLARLTGALAVLSFVLILTNFIFNPFLVSLASLIVAILFYFLVNQVKGPDFILIEQVIREENKRIQTIYRFFNLVTDVPQVQDDGKKRYHLPRLVAFFEGKEGDQASFLLARIFVRQPGYRNLLIRLILVGGLLIVLSSNMAFALIFAGLFILMALYQLTPILDDLNQTAYLKLLPLSQADLATALRKFLTKLAVFVVVIFTLLGLFTSISQALAILVLTSALAWAFIQVYLKRKYE

SEQ ID NO: 5469 - DNA, 1242 bp, Alloiococcus otitidis; identical to SEQ ID NO: 5459
  CDS (148)..(1239)

SEQ ID NO: 5470 - protein, 364 aa, Alloiococcus otitidis
MGAGGFLYREVLDSLKPGLLVGQVLTALILTFLLVWGRIASYMQNADRLFFLPRIEELKPSLRAYAWQSLLFKVLLLILAIFLLGPLIAGLTGYQVPELAVIGLQVLVLQLDWTYLSFQKKVTVRRLYLARLTGALAVLSFVLILTNFIFNPFLVSLASLIVAILFYFLVNQVKGPDFILIEQVIREENKRIQTIYRFFNLVTDVPQVQDDGKKRYHLPRLVAFFEGKEGDQASFLLARIFVRQPGYRNLLIRLILVGGLLIVLSSNMAFALIFAGLFILMALYQLTPILDDLNQTAYLKLLPLSQADLATALRKFLTKLAVFVVVIFTLLGLFTSISQALAILVLTSALAWAFIQVYLKRKYE

SEQ ID NO: 5471 - DNA, 1242 bp, Alloiococcus otitidis; identical to SEQ ID NO: 5459
  CDS (40)..(1239)

SEQ ID NO: 5472 - protein, 400 aa, Alloiococcus otitidis
MLKDLLDKRRSNFHSQVAKYLRLLFNDQFTILLLFLVGAGGFLYREVLDSLKPGLLVGQVLTALILTFLLVWGRIASYMQNADRLFFLPRIEELKPSLRAYAWQSLLFKVLLLILAIFLLGPLIAGLTGYQVPELAVIGLQVLVLQLDWTYLSFQKKVTVRRLYLARLTGALAVLSFVLILTNFIFNPFLVSLASLIVAILFYFLVNQVKGPDFILIEQVIREENKRIQTIYRFFNLVTDVPQVQDDGKKRYHLPRLVAFFEGKEGDQASFLLARIFVRQPGYRNLLIRLILVGGLLIVLSSNMAFALIFAGLFILMALYQLTPILDDLNQTAYLKLLPLSQADLATALRKFLTKLAVFVVVIFTLLGLFTSISQALAILVLTSALAWAFIQVYLKRKYE

SEQ ID NO: 5473 - DNA, 1242 bp, Alloiococcus otitidis; identical to SEQ ID NO: 5459
  CDS (31)..(1239)

SEQ ID NO: 5474 - protein, 403 aa, Alloiococcus otitidis
MIAVLKDLLDKRRSNFHSQVAKYLRLLFNDQFTILLLFLVGAGGFLYREVLDSLKPGLLVGQVLTALILTFLLVWGRIASYMQNADRLFFLPRIEELKPSLRAYAWQSLLFKVLLLILAIFLLGPLIAGLTGYQVPELAVIGLQVLVLQLDWTYLSFQKKVTVRRLYLARLTGALAVLSFVLILTNFIFNPFLVSLASLIVAILFYFLVNQVKGPDFILIEQVIREENKRIQTIYRFFNLVTDVPQVQDDGKKRYHLPRLVAFFEGKEGDQASFLLARIFVRQPGYRNLLIRLILVGGLLIVLSSNMAFALIFAGLFILMALYQLTPILDDLNQTAYLKLLPLSQADLATALRKFLTKLAVFVVVIFTLLGLFTSISQALAILVLTSALAWAFIQVYLKRKYE

SEQ ID NO: 5475 - DNA, 846 bp, Alloiococcus otitidis
  CDS (85)..(843)
atggacagaaaccgcttaggggtaaaacttataaagggtcggacttcgacaaatcaaattacagtaaataaaggatgcatatcaatgacattgaaagtgaccaacttaagtggtggctattaccacaaagaaatcatatcggatttaaattttaccatccatgacggggaaattgtctgcatggctggcttaaatggggccggcaaaagtacaaccattcgccatatcatgggcttgatgaagccttttaagggtgaaattagcctggatgggcaaaagttatcggaccaaaggatggcctatcaaaaacagatcgcttatataccggaaacacccatgatttatgacgacttaaccctgagggaccatattgagttgactgccctttcctatgatattccgaaagctgaggccatgaaccgggcccagcccctgttagacttgttccggctcaactgccagcttgattggtttcccgtggatttttccaaggggatgaagcaaaaagtaatgattatttgtgcctttatcacccgggctaagctgatgattattgatgaaccctttatcggtctcgaccccttggctatgcgggactttgtcaaattgatgcaagaagccaaggcgaggggagccggcattttaatgtcgacccatgtcttgtccagtgtcaaaaatgtttgtgatcgaatgctgattttagaagagggtaaggtaagagctcaaggaactttacaagagattgcccagctctttgacttggacattaaccagcttgacttggtctttgaaaaaatgatggcgcaaacttaccacccagaaggggggcttgatagcggtgcttaa

SEQ ID NO: 5476 - protein, 253 aa, Alloiococcus otitidis
MTLKVTNLSGGYYHKEIISDLNFTIHDGEIVCMAGLNGAGKSTTIRHIMGLMKPFKGEISLDGQKLSDQRMAYQKQIAYIPETPMIYDDLTLRDHIELTALSYDIPKAEAMNRAQPLLDLFRLNCQLDWFPVDFSKGMKQKVMIICAFITRAKLMIIDEPFIGLDPLAMRDFVKLMQEAKARGAGILMSTHVLSSVKNVCDRMLILEEGKVRAQGTLQEIAQLFDLDINQLDLVFEKMMAQTYHPEGGLDSGA

SEQ ID NO: 5477 - DNA, 846 bp, Alloiococcus otitidis; identical to SEQ ID NO: 5475
  CDS (1)..(843)

SEQ ID NO: 5478 - protein, 281 aa, Alloiococcus otitidis
MDRNRLGVKLIKGRTSTNQITVNKGCISMTLKVTNLSGGYYHKEIISDLNFTIHDGEIVCMAGLNGAGKSTTIRHIMGLMKPFKGEISLDGQKLSDQRMAYQKQIAYIPETPMIYDDLTLRDHIELTALSYDIPKAEAMNRAQPLLDLFRLNCQLDWFPVDFSKGMKQKVMIICAFITRAKLMIIDEPFIGLDPLAMRDFVKLMQEAKARGAGILMSTHVLSSVKNVCDRMLILEEGKVRAQGTLQEIAQLFDLDINQLDLVFEKMMAQTYHPEGGLDSGA

SEQ ID NO: 5479 - DNA, 333 bp, Alloiococcus otitidis
  CDS (82)..(330)
gctcttaccttaccctcttctaaaatcagcattcgatcacaaacatttttgacactggacaagacatgggtcgacattaaaatgccggctcccctcgccttggcttcttgcatcaatttgacaaagtcccgcatagccaaggggtcgagaccgataaagggttcatcaataatcatcagcttagcccgggtgataaaggcacaaataatcattactttttgcttcatccccttggaaaaatccacgggaaaccaatcaagctggcagttgagccggaacaagtctaacaggggctgggcccggttcatggcctcagctttcggaatatcatag

SEQ ID NO: 5480 - protein, 83 aa, Alloiococcus otitidis
MPAPLALASCINLTKSRIAKGSRPIKGSSIIISLARVIKAQIIITFCFIPLEKSTGNQSSWQLSRNKSNRGWARFMASAFGIS

SEQ ID NO: 5481 - DNA, 333 bp, Alloiococcus otitidis; identical to SEQ ID NO: 5479
  CDS (49)..(330)

SEQ ID NO: 5482 - protein, 94 aa, Alloiococcus otitidis
MTLDKTWVDIKMPAPLALASCINLTKSRIAKGSRPIKGSSIIISLARVIKAQIIITFCFIPLEKSTGNQSSWQLSRNKSNRGWARFMASAFGIS

SEQ ID NO: 5483 - DNA, 471 bp, Alloiococcus otitidis
  CDS (34)..(468)
aatggggacaagaatgatggaaagagggatattatgtctaattgtttattttgcgatatcatcgaagggaatgttccctcaagaaaggtctatgaagacgacaaggtctatgcctttatggacatctcccaaactactcctggccacacccttgtcgttcccaaagagcatgtaagaaacctctttgaaatgtctagtgaaacggccgctgacttattcagccgggtgccaaagatcacccaagcgatcaaggccagtgatgacaagataaaaggggctaatattttggtcaacaatgaggaagtagcctaccaatccgtcttccacagccacgtccacattataccaagatattcaagccaagacgactttgcccttaaatttaccgataattccgaaaaatacagcgatgaccaactggatgccatccaagcaagagtccagggtcagttgcaagaaggagggcaataa

SEQ ID NO: 5484 - protein, 145 aa, Alloiococcus otitidis
MSNCLFCDIIEGNVPSRKVYEDDKVYAFMDISQTTPGHTLVVPKEHVRNLFEMSSETAADLFSRVPKITQAIKASDDKIKGANILVNNEEVAYQSVFHSHVHIIPRYSSQDDFALKFTDNSEKYSDDQLDAIQARVQGQLQEGGQ

SEQ ID NO: 5485 - DNA, 228 bp, Alloiococcus otitidis
  CDS (16)..(225)
ttccaattggtattggtgggcaaggtcttggaattcttggttgattggaccttggaccttgtcaatctcacttttgacttggttgacggcttggttgaacttgttaaagtcatcttggacgactttggactggccttttaccccgtccacatagtcctggatacactgacggttgtccttgccagaccggggggtgtgacggaggccgtaaaagcctcccaaaactag

SEQ ID NO: 5486 - protein, 70 aa, Alloiococcus otitidis
MGKVLEFLVDWTLDLVNLTFDLVDGLVELVKVILDDFGLAFYPVHIVLDTLTVVLARPGGVTEAVKASQN

SEQ ID NO: 5487 - DNA, 498 bp, Alloiococcus otitidis
  CDS (166)..(495)
cctaccaatccgtcttccacagccacgtccacattataccaagatattcaagccaagacgactttgcccttaaatttaccgataattccgaaaaatacagcgatgaccaactggatgccatccaagcaagagtccagggtcagttgcaagaaggagggcaataagatgagcttcttattgggaaccgccgccgggctagttttgggaggcttttacggcctccgtcacaccccccggtctggcaaggacaaccgtcagtgtatccaggactatgtggacggggtaaaaggccagtccaaagtcgtccaagatgactttaacaagttcaaccaagccgtcaaccaagtcaaaagtgagattgacaaggtccaaggtccaatcaaccaagaattccaagaccttgcccaccaataccaattggaattagagcccagattgggtcggatccaaacccgggctaacaagttaaaggagaccttggataatttaaatgtctag

SEQ ID NO: 5488 - protein, 110 aa, Alloiococcus otitidis
MSFLLGTAAGLVLGGFYGLRHTPRSGKDNRQCIQDYVDGVKGQSKVVQDDFNKFNQAVNQVKSEIDKVQGPINQEFQDLAHQYQLELEPRLGRIQTRANKLKETLDNLNV

SEQ ID NO: 5489 - DNA, 1134 bp, Alloiococcus otitidis
  CDS (205)..(1131)
ttaggaagtgttatcataatgaaatttaaaaaagccatgactggcttagctattgggtccctcctctttttaggggcttgtggccaaaaccaagaaattgcttcaactactgctggccgaatccgccaagatgaattttacgaaagactcaaaaccaacccctcacctagtgggggtacctacggggaaatcgtcttgcagcaaatgcttctagaagatattttggagcaagcttacggtgaccaagtatcggatgaagaagtccaggcagaaatagacgatgtggcggaagctcaagggggccgggaagccttagaagagaccttggctaattcgccaactgatatggctgacttggaacaatcgattaaaatgaacttgatgatccgagcagctgtagccgaccgggcagacttttctgaagaagatgtcagagaacactacgattcccaagtgccagaaggaacccggatggcccacatcttagttgatgaagagcaggaagctaaagacatcatcgaagaactcaatgatggggcagactttgccgagttagctgaagaacggtcacaagaccctggttccgcttctaacggtggggagtatgaacttgaaaccggtcgctttgttcctgaggttgaagaggctgctatgtccttggatgaaggggaaattactgaggagccggttgaatcatcctttggctaccatgtcatcaaactcctagaaaaaggggaaaaagaagactttgaagatgccaaagaagaagcgaccaacaattatgtcgaagatgaattgctaagaaacccacaagtggtcaacagcattatgactgaactggtccaagaagctaatgttaatatagctgattctgacttgcaaaatgccatggccccattcctatcagaacctcaggtggaagaagaagaccctgaccaagaggaaagtgatggagaagacgaggaccaagaagaaggtcaagaccaggaagatgaccaagacaatggtgatgatggccaagacgatgaccaggatgacgatggtcaagatgatagcgaccaagacgatggcgaccaggaaaatgacgaccaagcagaaaatgaagcagacgaccaagacaacaatgaaggctag

SEQ ID NO: 5490 - protein, 309 aa, Alloiococcus otitidis
MLLEDILEQAYGDQVSDEEVQAEIDDVAEAQGGREALEETLANSPTDMADLEQSIKMNLMIRAAVADRADFSEEDVREHYDSQVPEGTRMAHILVDEEQEAKDIIEELNDGADFAELAEERSQDPGSASNGGEYELETGRFVPEVEEAAMSLDEGEITEEPVESSFGYHVIKLLEKGEKEDFEDAKEEATNNYVEDELLRNPQVVNSIMTELVQEANVNIADSDLQNAMAPFLSEPQVEEEDPDQEESDGEDEDQEEGQDQEDDQDNGDDGQDDDQDDDGQDDSDQDDGDQENDDQAENEADDQDNNEG

SEQ ID NO: 5491 - DNA, 1134 bp, Alloiococcus otitidis; identical to SEQ ID NO: 5489
  CDS (19)..(1131)

SEQ ID NO: 5492 - protein, 371 aa, Alloiococcus otitidis
MKFKKAMTGLAIGSLLFLGACGQNQEIASTTAGRIRQDEFYERLKTNPSPSGGTYGEIVLQQMLLEDILEQAYGDQVSDEEVQAEIDDVAEAQGGREALEETLANSPTDMADLEQSIKMNLMIRAAVADRADFSEEDVREHYDSQVPEGTRMAHILVDEEQEAKDIIEELNDGADFAELAEERSQDPGSASNGGEYELETGRFVPEVEEAAMSLDEGEITEEPVESSFGYHVIKLLEKGEKEDFEDAKEEATNNYVEDELLRNPQVVNSIMTELVQEANVNIADSDLQNAMAPFLSEPQVEEEDPDQEESDGEDEDQEEGQDQEDDQDNGDDGQDDDQDDDGQDDSDQDDGDQENDDQAENEADDQDNNEG

SEQ ID NO: 5493 - DNA, 1020 bp, Alloiococcus otitidis
  CDS (49)..(1017)
gccagaccaagtgaccaatttatccaagctttaaaggaagtgacaaaaatggccaagatttatgactaccaagtgaatgacaagctcgaactttacctcttaattaagagtgctacagaaaaagaagccagaaatggcaagccctatattgcctttgtcttccaagatactagtggagaaatttcggcgaatttatgggatgccaggcctgaccaagtccaagcctttcaagaaggtcgggttgtttacttagaaggtaagcggacggagtacaaggggattccccagattaacatctcctctatccgcttagcaaagtcaggggaacccaaccggccagaactctttgttaaaagggctcctatgaaaaaagaggaaatggtggaagacttaaaccaggccattctctccattaccaaccctagcattaaccggattgtccgctatattttaaacaagcaccacaaatctttctttgaatacccagcagccaagtctaaccaccatgccttttatgccggtttagcctaccacacggtcaccatgctaaaaatcgcccaggccttagctgaaatctacccaaaccttaacaagtccctcctttatgggggcttgatccttcacgacctgggtaagaccatggaactttctgggccgactgccacccaatatacctttgaagggaagttaatgggtcatatcgtcttagtcaatgaccaaatcgcccaggcctgtcaagatttgaaaattgatgagtctttagaggaagtcgtcctcttgaagcatatggtcctctcccaccatggtcaattggaatttggctctcccgtccggccccaactcttagaggcggaagtcctccaccaaattgacttgattgatgccaagataaatatggtcagttctgaattggacaagaccgacccaggtcagtttactcctaaaatttgggctatggacaaccggtctttctaccatccaggactagaagaggggtcaagccagagcaaggattcttga

SEQ ID NO: 5494 - protein, 323 aa, Alloiococcus otitidis
MAKIYDYQVNDKLELYLLIKSATEKEARNGKPYIAFVFQDTSGEISANLWDARPDQVQAFQEGRVVYLEGKRTEYKGIPQINISSIRLAKSGEPNRPELFVKRAPMKKEEMVEDLNQAILSITNPSINRIVRYILNKHHKSFFEYPAAKSNHHAFYAGLAYHTVTMLKIAQALAEIYPNLNKSLLYGGLILHDLGKTMELSGPTATQYTFEGKLMGHIVLVNDQIAQACQDLKIDESLEEVVLLKHMVLSHHGQLEFGSPVRPQLLEAEVLHQIDLIDAKINMVSSELDKTDPGQFTPKIWAMDNRSFYHPGLEEGSSQSKDS

SEQ ID NO: 5495 - DNA, 1020 bp, Alloiococcus otitidis; identical to SEQ ID NO: 5493
  CDS (40)..(1017)

SEQ ID NO: 5496 - protein, 326 aa, Alloiococcus otitidis
MTKMAKIYDYQVNDKLELYLLIKSATEKEARNGKPYIAFVFQDTSGEISANLWDARPDQVQAFQEGRVVYLEGKRTEYKGIPQINISSIRLAKSGEPNRPELFVKRAPMKKEEMVEDLNQAILSITNPSINRIVRYILNKHHKSFFEYPAAKSNHHAFYAGLAYHTVTMLKIAQALAEIYPNLNKSLLYGGLILHDLGKTMELSGPTATQYTFEGKLMGHIVLVNDQIAQACQDLKIDESLEEVVLLKHMVLSHHGQLEFGSPVRPQLLEAEVLHQIDLIDAKINMVSSELDKTDPGQFTPKIWAMDNRSFYHPGLEEGSSQSKDS

SEQ ID NO: 5497 - DNA, 2748 bp, Alloiococcus otitidis
  CDS (1378)..(2745)
tcgaccaagccaagcaattattggaccaagaggataaaggataaggaggcagtcatgcgaattaaagcgatacggattctgggctttggcaagtggttagaccaagcttttgacctccagggggacttggatgtcttttacggtggcaatgaagcgggtaagtctaccttggttgcctttatccaggctattttatttggcttccccacccgggtgcaaaacgacaaccgctatgaacccaagactagtagccagtatgggggaagcttggaggtcgttgattccaaattgggtgatgtgacggttgaacgcctgccggataaaaaagtgtcaggccaaggtcggattattttacccgaccagactattctagatgaaaacttttttcagagtctcttgtccaatatcaacctccaagtctttcggcaattttacttattcagcctggatgacctggaaaaaatcaaccaagtcaagcccagccaattagaagaaaattttctgaacttaagcgtgtcgggggcagctaattatttggaactggcggcagattttgacaaaaaggctcaagaaattttcaaaccgtctggccggatgcccctgcttaaccaggccttggctgacctgaaagaggctgaagagaactttcatgaagctgacagacataatgcaagttacctcagcttgcttgaagaactgaaagctatcgatcaacaaatcgacctagtcaagcaaagattagaccaagaaagacaggatagggaccaagttcagttttacttaaaaaattggtcgaaaattgaccgtctccagtttttgaaccaggcccttgaccagtcaggagaccggattaaagaggatgactggctagcctttgaagactggttgagtcagtctcaagaaaaaaacaatcaaattgaccatttgaataaagagttggaagatttacaggctagccaagaaggcttggacgccggtgctgtgagcttagaagattactaccgcaatcgggcgtcctatgacaagttgtttgaccaaacttccaggttagttgacttgtcccaggcctgtcaggaacttgaccaagacttatctaacttgaaacgaaaccaccaagacctgggccaagacttggacctagatccagaccaagaagtgcaaaaaattgaccaggaggataggagtaagctatcgtcttggttagaggagtggcggcagacccagtccaagctggccgacttggatgacgctatttacaaggcagaaacccaggcccggatcagacaagttttacaggaagaaaacagtcaagacgaagactcgccaggttggctttggccgggccttgcttttatcgtagcctttctcctggccttcttgtttgacttttcctttgccctgtcagtgatcttagccttgttggcggctggaggagtctactttttaagccaggcaaggggagagaaccaggcaagccaggtttccctaggccaaggccgattggaccaggccgaagacatagaccatctccaagacctaaaagcaaaagaagaaggtaggcgtaagcaattggaggaccgttaccaggactttttgcgggccaaaaatttaagccaggacctaaacttgagagaccttatcagccgggttaacttttttaaccagtatgtcgaccaggcacatactatcttggacctccaggcagagaggactgacctcggccaaaaagtccaaagacaggcggactggattgaccagcagacggatgattttgcgacttaccaagacccccattataagatagcggctttaaaccagtttaagaccctggtcgaccaggccttaaaagaagaccgacaagaccagcaagagcttaaccggcttagccaagaattgggggacttaaaccaggaggctgaccagcttgaccgcaaaatgaaccaggtcatggccaagtaccatgagacctccattgctcgctttaaaaagcaaattgcctggtcccgccaagcccaaaaccaggcagaagagagggataggcttgaggcctttttccaagaaaataaaaaaactggtgaccagaccgacttaggtaaagttaactaccaaagcttaaaccggaaagaccaggaaattcaggctagattgaaggagcaagctagcaagaaggaccatttgattgaagagaagtccagccttaaactccaggcccaaaagattgaaatgggcggggaatatgaagaacgagcccagattttggaaaaccaaaaagcctatgtccaagacctagcccaagaatggttgacctacaagttagcctctgacctaatccaagagactatcaaggcgggagtgagagaccaagtgcctaccatcttagaccaggctagtgactattttaaccggctgagcctgggcaactaccaatctatccaatttaaggccgataaaattcaggtccaaaggcaagacgggcaaatctttggagtcaaggacctatcacgggggactgctgagcccctctatgcggcccttcgcttggccgtcatccaatttcagtcaagcaagcttcaatttcctattattgtggacgactcctttgttaacttagaccctgaccgtaagaaagttatttatgatatattggaagaaatcagtcaagacaaccaggttatcctctttacatttgaccccagtgttttaagccggtttaagccagaccaagtgaccaatttatccaagctttaa

SEQ ID NO: 5498 - protein, 456 aa, Alloiococcus otitidis
MFDFSFALSVILALLAAGGVYFLSQARGENQASQVSLGQGRLDQAEDIDHLQDLKAKEEGRRKQLEDRYQDFLRAKNLSQDLNLRDLISRVNFFNQYVDQAHTILDLQAERTDLGQKVQRQADWIDQQTDDFATYQDPHYKIAALNQFKTLVDQALKEDRQDQQELNRLSQELGDLNQEADQLDRKMNQVMAKYHETSIARFKKQIAWSRQAQNQAEERDRLEAFFQENKKTGDQTDLGKVNYQSLNRKDQEIQARLKEQASKKDHLIEEKSSLKLQAQKIEMGGEYEERAQILENQKAYVQDLAQEWLTYKLASDLIQETIKAGVRDQVPTILDQASDYFNRLSLGNYQSIQFKADKIQVQRQDGQIFGVKDLSRGTAEPLYAALRLAVIQFQSSKLQFPIIVDDSFVNLDPDRKKVIYDILEEISQDNQVILFTFDPSVLSRFKPDQVTNLSKL

SEQ ID NO: 5499 - DNA, 2748 bp, Alloiococcus otitidis; identical to SEQ ID NO: 5497
  CDS (55)..(2745)

SEQ ID NO: 5500 - protein, 897 aa, Alloiococcus otitidis
MRIKAIRILGFGKWLDQAFDLQGDLDVFYGGNEAGKSTLVAFIQAILFGFPTRVQNDNRYEPKTSSQYGGSLEVVDSKLGDVTVERLPDKKVSGQGRIILPDQTILDENFFQSLLSNINLQVFRQFYLFSLDDLEKINQVKPSQLEENFLNLSVSGAANYLELAADFDKKAQEIFKPSGRMPLLNQALADLKEAEENFHEADRHNASYLSLLEELKAIDQQIDLVKQRLDQERQDRDQVQFYLKNWSKIDRLQFLNQALDQSGDRIKEDDWLAFEDWLSQSQEKNNQIDHLNKELEDLQASQEGLDAGAVSLEDYYRNRASYDKLFDQTSRLVDLSQACQELDQDLSNLKRNHQDLGQDLDLDPDQEVQKIDQEDRSKLSSWLEEWRQTQSKLADLDDAIYKAETQARIRQVLQEENSQDEDSPGWLWPGLAFIVAFLLAFLFDFSFALSVILALLAAGGVYFLSQARGENQASQVSLGQGRLDQAEDIDHLQDLKAKEEGRRKQLEDRYQDFLRAKNLSQDLNLRDLISRVNFFNQYVDQAHTILDLQAERTDLGQKVQRQADWIDQQTDDFATYQDPHYKIAALNQFKTLVDQALKEDRQDQQELNRLSQELGDLNQEADQLDRKMNQVMAKYHETSIARFKKQIAWSRQAQNQAEERDRLEAFFQENKKTGDQTDLGKVNYQSLNRKDQEIQARLKEQASKKDHLIEEKSSLKLQAQKIEMGGEYEERAQILENQKAYVQDLAQEWLTYKLASDLIQETIKAGVRDQVPTILDQASDYFNRLSLGNYQSIQFKADKIQVQRQDGQIFGVKDLSRGTAEPLYAALRLAVIQFQSSKLQFPIIVDDSFVNLDPDRKKVIYDILEEISQDNQVILFTFDPSVLSRFKPDQVTNLSKL

SEQ ID NO: 5501 - DNA, 1236 bp, Alloiococcus otitidis
  CDS (121)..(1233)
ctcagggctcttttcttaccaaaaacaagaatatatgttcccattattggaggttctatggtaaaatttatacatacagcagacctacatttaaatagtccctttaagggtttagcccatatggaccgggaccttttaaaccaagtcaaggcttcgacctttgatgcttttgctcgagtagtcgaccaggccttagaccaggaggtagactttgtcctaattgctggcgacctatttgacctagccagccggagtatctacgcccaggtcttcttgaaagaccagtttacccgcttgcaggaggcgggcatcccggtttttatcggctttgggaaccatgattatgttgcagaccaacgcttttacctagactttcctgacaatgtcactattttccccgaccaagtgacaacccattacctagaaagcaaagctggggaaaaagttgccattacgggctttagctaccaccagcaacatatcgcaaaaaacatgctggccagctttccagccagggacaagcaggtggactaccacttgggtctttaccacggggacttggccagccagtcccaggactatgcccctttccagaaagaagatatagccagactccactaccactacctagccttgggtcatatccacttcttccaccaagttttccccgacctgccggcttattatccaggcaatacccaaggccgtcatatcaatgagaaagggcagaagggcgcccttttagttactttgcaaggacccaaccaccaggtcagctttttcccaactgccagtttagagtgggatgaatgggacttgccagtaacggaccaggacacgattaactctgtccaccaggccttgctagaccgcttggcagggaaaaagacttatcaaattatccgggtcaatttcttggtccatgaccaagcaggaaaagacctagccgaccagctcagtgccgacaagttaaatgaacttgtcttggaccaagacctttggctcaaggaccggaaaattatctggcaggctaaacaagacaagttggctagcctttatcctagggcctggcaagaagccgtgacctctctcaagaggaccggccttgacggctacctaaacatacttaagcaaaagatagatgaatcttacctcaaagacttggagtcgagctcccgccaggctgacctagtcgaccaagccaagcaattattggaccaagaggataaaggataa

SEQ ID NO: 5502 - protein, 371 aa, Alloiococcus otitidis
MDRDLLNQVKASTFDAFARVVDQALDQEVDFVLIAGDLFDLASRSIYAQVFLKDQFTRLQEAGIPVFIGFGNHDYVADQRFYLDFPDNVTIFPDQVTTHYLESKAGEKVAITGFSYHQQHIAKNMLASFPARDKQVDYHLGLYHGDLASQSQDYAPFQKEDIARLHYHYLALGHIHFFHQVFPDLPAYYPGNTQGRHINEKGQKGALLVTLQGPNHQVSFFPTASLEWDEWDLPVTDQDTINSVHQALLDRLAGKKTYQIIRVNFLVHDQAGKDLADQLSADKLNELVLDQDLWLKDRKIIWQAKQDKLASLYPRAWQEAVTSLKRTGLDGYLNILKQKIDESYLKDLESSSRQADLVDQAKQLLDQEDKG

SEQ ID NO: 5503 - DNA, 1236 bp, Alloiococcus otitidis; identical to SEQ ID NO: 5501
  CDS (58)..(1233)

SEQ ID NO: 5504 - protein, 392 aa, Alloiococcus otitidis
MVKFIHTADLHLNSPFKGLAHMDRDLLNQVKASTFDAFARVVDQALDQEVDFVLIAGDLFDLASRSIYAQVFLKDQFTRLQEAGIPVFIGFGNHDYVADQRFYLDFPDNVTIFPDQVTTHYLESKAGEKVAITGFSYHQQHIAKNMLASFPARDKQVDYHLGLYHGDLASQSQDYAPFQKEDIARLHYHYLALGHIHFFHQVFPDLPAYYPGNTQGRHINEKGQKGALLVTLQGPNHQVSFFPTASLEWDEWDLPVTDQDTINSVHQALLDRLAGKKTYQIIRVNFLVHDQAGKDLADQLSADKLNELVLDQDLWLKDRKIIWQAKQDKLASLYPRAWQEAVTSLKRTGLDGYLNILKQKIDESYLKDLESSSRQADLVDQAKQLLDQEDKG

SEQ ID NO: 5505 - DNA, 426 bp, Alloiococcus otitidis
  CDS (52)..(423)
gtcatttctggtatactcatagggtatcatgacgaaggagtggtaagagaaatgcccgttaatatttacgacgcagccaaccagttagaaagtgacttacgtcaaacggacgaattcaaagacctggtccaagcttttgaagcagtcgaaaaagatgaaatagctagtaagctctttgatgacttcagacaggtccaacaaggcatccagcaaaaacaaatgacaggccaagaaatcaccgaagaagatgccaaacaagcccaagaattatcggctaaggtaggggaaaacaagaccctagcccagctcattcaagccgagcaaaaggtaagccaggttattgatgagatcaaccaaattgccttgcgaccgattcaagagctttaccaaaaacaccaacccaaaactggccaggaagaacaataa

SEQ ID NO: 5506 - protein, 124 aa, Alloiococcus otitidis
MPVNIYDAANQLESDLRQTDEFKDLVQAFEAVEKDEIASKLFDDFRQVQQGIQQKQMTGQEITEEDAKQAQELSAKVGENKTLAQLIQAEQKVSQVIDEINQIALRPIQELYQKHQPKTGQEEQ

SEQ ID NO: 5507 - DNA, 426 bp, Alloiococcus otitidis; identical to SEQ ID NO: 5505
  CDS (40)..(423)

SEQ ID NO: 5508 - protein, 128 aa, Alloiococcus otitidis
MVREMPVNIYDAANQLESDLRQTDEFKDLVQAFEAVEKDEIASKLFDDFRQVQQGIQQKQMTGQEITEEDAKQAQELSAKVGENKTLAQLIQAEQKVSQVIDEINQIALRPIQELYQKHQPKTGQEEQ

SEQ ID NO: 5509 - DNA, 936 bp, Alloiococcus otitidis
  CDS (28)..(933)
aagacgtattttaaaggagctgaatttatggcacattttgtcaagaatctaaaattaacagtcagcttagccctagtttctagttttttactggcttgcgagggcaacgataaagctgttgacgaaaaacttgtggacggagaccaaatagaacttgcccataatgattgggaagaatctttagcttcaacaaatgttattgcccaagtattagaagaaattggttatgatgtcactttgactagtgtagatgtttctgtcatgtggcaggccctagctgagggggaaactgatgcctcagttactgcctggcttcctattacacatggggctcaagaagaggaatatggcgatcagattgaaaatctcggtccccatactcacggggctaaaattggtctagcagtccctacctatatggaagaccttaactccattgaagacttggacgaccaggccgataaaacgattacaggtattgagcctggtgctgggataatggattcctccgaagaagctatggaagtatatgataacctggcagactgggaattacagaatgcttctacaggcgcaatgacaacagaattaagaaccagatatgaaaaccaagaagaaattgtggtaacaggctggaatcctcattggatgttccaagaatttgacttgaaatacctggatgatcctgaaaatgtttacggtgatgatgagtcgatctatactcatgttcgacaaggttttgaggatgatcatccaattgccttttctgttttggataatttcgagtgggaaatggatgacctggaagcagtcgttttggaattggcagaaaccgatgatccagagctagcagctgaaaattggataagtgaaaaccaggaaaaagtccaagaatggatttcggaggctcaagaactggctagtgaaagcaattaa

SEQ ID NO: 5510 - protein, 302 aa, Alloiococcus otitidis
MAHFVKNLKLTVSLALVSSFLLACEGNDKAVDEKLVDGDQIELAHNDWEESLASTNVIAQVLEEIGYDVTLTSVDVSVMWQALAEGETDASVTAWLPITHGAQEEEYGDQIENLGPHTHGAKIGLAVPTYMEDLNSIEDLDDQADKTITGIEPGAGIMDSSEEAMEVYDNLADWELQNASTGAMTTELRTRYENQEEIVVTGWNPHWMFQEFDLKYLDDPENVYGDDESIYTHVRQGFEDDHPIAFSVLDNFEWEMDDLEAVVLELAETDDPELAAENWISENQEKVQEWISEAQELASESN

SEQ ID NO: 5511 - DNA, 1896 bp, Alloiococcus otitidis
  CDS (67)..(1893)
aaagaaacaggggggaagaatatgcatttgaagagaaaatacgcgctactcgccagctcaaccctagtggccttgaccctagcagcttgtggcggcgaaagtggccaggaagaaggcggagcacctgctgattcaggtgaacaaacggaagaaactaacgaagaaagcaatggtgaagagtccagtgctgtttccgttgatgactttgagtctacggtcgaaaacgaaggcgagcccattgatggtggggtggctcaagttgggattgtagctgactctgcttggactggtatctttgactggcaactatacgaagtgagtacggactcaaccttgaatggcttcaccttgggcgaattattgacccaagatgagaactttgaactagttgggggcgaagaatggggtacagctgccgatattgaatttgacgaagaaaattcaagtgtcaccattactgttcgcgatgatgtgtactggcatgatggcgagcaggtgacagctgatgatgtggtctttgcccacgaaattctaggggaccctaactacaccggtatccgttacggtgaagacatcgctaatgttgaagggatggaagagtttaaaaatggtgaagctgactccatttcaggtctagagttgtcagacgatgaaatgtctgtgactatccattacaaggaatttgaccctaccatgacccaagcaggtgggggagtttggtcttatgctgctcctcgccaccacttaggcgatatcccagctgaagaactggaatctcacccgaatgtccgagaaaatccagttggctttggacctttcaaggtcgataatgttgttccgggtgaatcggtagaattttctgcctttgaagactattatttaggggctccaaagctagacggcattactgtggaacgtgttccatcatccggtgctattgaagcccttcgtgcgggtgaatttgactgggttgacacagttcctactgatcaatacgataccttccaagacggtatcccgggttacactaccctcggctacaccggtcaaagttatgactttatcggctttaaattaggtgagtgggatcaagaagccggtaaggttcaagtcgatccagatgctaaaatggctgataaaaacttacgccaggctatggcttacgccttggacattgaccaggttagcgaatccttctattctggtctccgccagcgggcaaccacccacattattcccaactttactgacttccaccgagatgacttggaaggttacccttatgaccctgaccgggctaaccaattgctagacgaagctggctacgaagatgtagacggagacggctaccgggaagatcctgacggtgaaccgctagaaatcacctatgcttcccgagcaggttctgaggtcgcagaaacggttgcccaatactatctccaggcctgggaagaagttggccttaatgtttccttactagatggccgactccacgagaataatgcccacatcgaccgggttcaagcagatgacccagatattgacgtatttgaattaggctttggggtagggtctgacccaacaccaattggcttgtacggtccaaatgaaccatttaacttggcccgctatgagtctgaggaaaacaatgagtacttgcaagattttgtctccgaagaagcctttgatgacgaataccgccagcaagtcttctacgactggcaggaattcttcatagacgagatcccgaccctccctaccttctggcgtacagaacttcaattggttaatgaccgggtatctgtctatgcccacgacgcaattcctggccaagacccggatgtttatggtcttcaccaaattgaactcttggcagaagaacccataactgaataa

SEQ ID NO: 5512 - protein, 609 aa, Alloiococcus otitidis
MALTLAACGGESGQEEGGAPADSGEQTEETNEESNGEESSAVSVDDFESTVENEGEPIDGGVAQVGIVADSAWTGIFDWQLYEVSTDSTLNGFTLGELLTQDENFELVGGEEWGTAADIEFDEENSSVTITVRDDVYWHDGEQVTADDVVFAHEILGDPNYTGIRYGEDIANVEGMEEFKNGEADSISGLELSDDEMSVTIHYKEFDPTMTQAGGGVWSYAAPRHHLGDIPAEELESHPNVRENPVGFGPFKVDNVVPGESVEFSAFEDYYLGAPKLDGITVERVPSSGAIEALRAGEFDWVDTVPTDQYDTFQDGIPGYTTLGYTGQSYDFIGFKLGEWDQEAGKVQVDPDAKMADKNLRQAMAYALDIDQVSESFYSGLRQRATTHIIPNFTDFHRDDLEGYPYDPDRANQLLDEAGYEDVDGDGYREDPDGEPLEITYASRAGSEVAETVAQYYLQAWEEVGLNVSLLDGRLHENNAHIDRVQADDPDIDVFELGFGVGSDPTPIGLYGPNEPFNLARYESEENNEYLQDFVSEEAFDDEYRQQVFYDWQEFFIDEIPTLPTFWRTELQLVNDRVSVYAHDAIPGQDPDVYGLHQIELLAEEPITE

SEQ ID NO: 5513 - DNA, 1896 bp, Alloiococcus otitidis; identical to SEQ ID NO: 5511
  CDS (22)..(1893)

SEQ ID NO: 5514 - protein, 624 aa, Alloiococcus otitidis
MHLKRKYALLASSTLVALTLAACGGESGQEEGGAPADSGEQTEETNEESNGEESSAVSVDDFESTVENEGEPIDGGVAQVGIVADSAWTGIFDWQLYEVSTDSTLNGFTLGELLTQDENFELVGGEEWGTAADIEFDEENSSVTITVRDDVYWHDGEQVTADDVVFAHEILGDPNYTGIRYGEDIANVEGMEEFKNGEADSISGLELSDDEMSVTIHYKEFDPTMTQAGGGVWSYAAPRHHLGDIPAEELESHPNVRENPVGFGPFKVDNVVPGESVEFSAFEDYYLGAPKLDGITVERVPSSGAIEALRAGEFDWVDTVPTDQYDTFQDGIPGYTTLGYTGQSYDFIGFKLGEWDQEAGKVQVDPDAKMADKNLRQAMAYALDIDQVSESFYSGLRQRATTHIIPNFTDFHRDDLEGYPYDPDRANQLLDEAGYEDVDGDGYREDPDGEPLEITYASRAGSEVAETVAQYYLQAWEEVGLNVSLLDGRLHENNAHIDRVQADDPDIDVFELGFGVGSDPTPIGLYGPNEPFNLARYESEENNEYLQDFVSEEAFDDEYRQQVFYDWQEFFIDEIPTLPTFWRTELQLVNDRVSVYAHDAIPGQDPDVYGLHQIELLAEEPITE

SEQ ID NO: 5515 - DNA, 234 bp, Alloiococcus otitidis
  CDS (1)..(231)
gtgagtgggatcaagaagccggtaaggttcaagtcgatccagatgctaaaatggctgataaaaacttacgccaggctatggcttacgccttggacattgaccaggttagcgaatccttctattctggtctccgccagcgggcaaccacccacattattcccaactttactgacttccaccgagatgacttggaaggttacccttatgaccctgaccgggctaaccaattgctag

SEQ ID NO: 5516 - protein, 77 aa, Alloiococcus otitidis
MSGIKKPVRFKSIQMLKWLIKTYARLWLTPWTLTRLANPSILVSASGQPPTLFPTLLTSTEMTWKVTLMTLTGLTNC

SEQ ID NO: 5517 - DNA, 261 bp, Alloiococcus otitidis
  CDS (16)..(258)
gccaccccaccatcaatgggctcgccttcgttttcgaccgtagactcaaagtcatcaacggaaacagcactggactcttcaccattgctttcttcgttagtttcttccgtttgttcacctgaatcagcaggtgctccgccttcttcctggccactttcgccgccacaagctgctagggtcaaggccactagggttgagctggcgagtagcgcgtattttctcttcaaatgcatattcttcccccctgtttctttttactag

SEQ ID NO: 5518 - protein, 81 aa, Alloiococcus otitidis
MGSPSFSTVDSKSSTETALDSSPLLSSLVSSVCSPESAGAPPSSWPLSPPQAARVKATRVELASSAYFLFKCIFFPPVSFY

SEQ ID NO: 5519 - DNA, 2031 bp, Alloiococcus otitidis
  CDS (727)..(2028)
aggaatagaagcgagagcttattaaacacttattattttgttttgaaaggagaagggtacttaattgtaagacaggctcttgtttatattcctgttttcttttttataacacatgacgcttgtcccaaattttttgggacaggcaagagacgtttagggggaattattttgcttttaaataaaaaatacgccttattggctagttcaacactcctagccttgactttagcagcctgtgggggcgaaagcggtcaaaataatgccgggacaccagctggttcaggtgaccaaacagaagaaacaaatgttgaagaggccagtactgtttccagtgatgactttgaatccactgtccaaaacgaaggtgaccccattgatggtggggtagcccaggtaggtttagtggcggatacagcatggactggtatctttgactggcaattatacgaaataaacacggactcaaccttgaatagctataccctaggaagcttgctgacagtggatgaaaactttgaattagttgggggtgaagaatggggaacggctgccgatattgattttgaccaggaaaattcaagtgtcaccatcacggtgcgggatgatgtctattggcatgacggcgagcaggtgacagctgatgatgtggtctttgcccatgaaattgttggcgatccagactataccgggatccggtatggggacgactttaaaaatattgaaggaatggaagagtttaaagatggccaagctgacactatttctggcttagacttgtctgatgacgaaatgtctgtgaccatccactacaaagaatttgatccaaccatgacccaagcaggtgggggagtttggtcttacgccgctccacgacactacttgggcgatatcccagctgaagacttggaatcccaccccaatgtccgggaaaatccgattggctttggaccttttaaagttgataatgttgtaccgggtgagtcagttgaattttcggcctttgaagacttctacgatggggcgcctaaaattgatggcgttgtcgttgagcgagttccaacttctggagccattgaggccttgcgggctggtgagtttgactgggtccactctgtaccgactgaccagtttgataccttccaagaaggtatccctggttatacgatcttaggttacccaggtcagaactacgaatttctcggtttcaaaatgggagagtgggacaatgaaaataacaaggtccaatacaaccccgatgccaaaatggctgataaaaacttacgccaggctatgggctatgctttggacattgaccaggtcggccaatccttctattccggcctccgttaccgggcaacttctcacatcgtgcccaactttactgacttccaccgggatgacttggaaggctacccttatgacccagaccgggctaagcaattattagatgaagctgggtacgaagatattgatggggatggtttccgggaagacccagatggccaacccttggaaattacctacgctgcccgggctaattcagatgtggcggagcccattgctcaatactttatccaagcttgggaagaaatcggcttaaatgtttctctcttggaaggccgactccatgaagtcaatgccttctatgaccgaatccaagaagacgatcccgctattgacgtttttgaagccggctttggcgttgggactgacccgactccgattgaagcatttggccctaaccaacccttcaactatgctcgttatgaaacggaagaaaataatgagtacttgcaagagttcgtatcagatgaagccttcgatgatgactaccgcaaacaagtcttctatgactggcaagaattcttcatggacgaggttccactgttacctactttctggcggactgagttgcaattggtcaacaaccgggtgtcagcttatgcccacgaagaacttcctggcgtagaccctgatacttacggcctccaccagattgaactcctagctgaagaacccttgactgaataa

SEQ ID NO: 5520 - protein, 434 aa, Alloiococcus otitidis
MEEFKDGQADTISGLDLSDDEMSVTIHYKEFDPTMTQAGGGVWSYAAPRHYLGDIPAEDLESHPNVRENPIGFGPFKVDNVVPGESVEFSAFEDFYDGAPKIDGVVVERVPTSGAIEALRAGEFDWVHSVPTDQFDTFQEGIPGYTILGYPGQNYEFLGFKMGEWDNENNKVQYNPDAKMADKNLRQAMGYALDIDQVGQSFYSGLRYRATSHIVPNFTDFHRDDLEGYPYDPDRAKQLLDEAGYEDIDGDGFREDPDGQPLEITYAARANSDVAEPIAQYFIQAWEEIGLNVSLLEGRLHEVNAFYDRIQEDDPAIDVFEAGFGVGTDPTPIEAFGPNQPFNYARYETEENNEYLQEFVSDEAFDDDYRKQVFYDWQEFFMDEVPLLPTFWRTELQLVNNRVSAYAHEELPGVDPDTYGLHQIELLAEEPLTE

SEQ ID NO: 5521 - DNA, 2031 bp, Alloiococcus otitidis; identical to SEQ ID NO: 5519
  CDS (403)..(2028)

SEQ ID NO: 5522 - protein, 542 aa, Alloiococcus otitidis
MADTAWTGIFDWQLYEINTDSTLNSYTLGSLLTVDENFELVGGEEWGTAADIDFDQENSSVTITVRDDVYWHDGEQVTADDVVFAHEIVGDPDYTGIRYGDDFKNIEGMEEFKDGQADTISGLDLSDDEMSVTIHYKEFDPTMTQAGGGVWSYAAPRHYLGDIPAEDLESHPNVRENPIGFGPFKVDNVVPGESVEFSAFEDFYDGAPKIDGVVVERVPTSGAIEALRAGEFDWVHSVPTDQFDTFQEGIPGYTILGYPGQNYEFLGFKMGEWDNENNKVQYNPDAKMADKNLRQAMGYALDIDQVGQSFYSGLRYRATSHIVPNFTDFHRDDLEGYPYDPDRAKQLLDEAGYEDIDGDGFREDPDGQPLEITYAARANSDVAEPIAQYFIQAWEEIGLNVSLLEGRLHEVNAFYDRIQEDDPAIDVFEAGFGVGTDPTPIEAFGPNQPFNYARYETEENNEYLQEFVSDEAFDDDYRKQVFYDWQEFFMDEVPLLPTFWRTELQLVNNRVSAYAHEELPGVDPDTYGLHQIELLAEEPLTE

SEQ ID NO: 5523 - DNA, 2031 bp, Alloiococcus otitidis; identical to SEQ ID NO: 5519
  CDS (220)..(2028)

SEQ ID NO: 5524 - protein, 603 aa, Alloiococcus otitidis
MTLAACGGESGQNNAGTPAGSGDQTEETNVEEASTVSSDDFESTVQNEGDPIDGGVAQVGLVADTAWTGIFDWQLYEINTDSTLNSYTLGSLLTVDENFELVGGEEWGTAADIDFDQENSSVTITVRDDVYWHDGEQVTADDVVFAHEIVGDPDYTGIRYGDDFKNIEGMEEFKDGQADTISGLDLSDDEMSVTIHYKEFDPTMTQAGGGVWSYAAPRHYLGDIPAEDLESHPNVRENPIGFGPFKVDNVVPGESVEFSAFEDFYDGAPKIDGVVVERVPTSGAIEALRAGEFDWVHSVPTDQFDTFQEGIPGYTILGYPGQNYEFLGFKMGEWDNENNKVQYNPDAKMADKNLRQAMGYALDIDQVGQSFYSGLRYRATSHIVPNFTDFHRDDLEGYPYDPDRAKQLLDEAGYEDIDGDGFREDPDGQPLEITYAARANSDVAEPIAQYFIQAWEEIGLNVSLLEGRLHEVNAFYDRIQEDDPAIDVFEAGFGVGTDPTPIEAFGPNQPFNYARYETEENNEYLQEFVSDEAFDDDYRKQVFYDWQEFFMDEVPLLPTFWRTELQLVNNRVSAYAHEELPGVDPDTYGLHQIELLAEEPLTE

SEQ ID NO: 5525 - DNA, 2031 bp, Alloiococcus otitidis; identical to SEQ ID NO: 5519
  CDS (169)..(2028)

SEQ ID NO: 5526 - protein, 620 aa, Alloiococcus otitidis
MLLNKKYALLASSTLLALTLAACGGESGQNNAGTPAGSGDQTEETNVEEASTVSSDDFESTVQNEGDPIDGGVAQVGLVADTAWTGIFDWQLYEINTDSTLNSYTLGSLLTVDENFELVGGEEWGTAADIDFDQENSSVTITVRDDVYWHDGEQVTADDVVFAHEIVGDPDYTGIRYGDDFKNIEGMEEFKDGQADTISGLDLSDDEMSVTIHYKEFDPTMTQAGGGVWSYAAPRHYLGDIPAEDLESHPNVRENPIGFGPFKVDNVVPGESVEFSAFEDFYDGAPKIDGVVVERVPTSGAIEALRAGEFDWVHSVPTDQFDTFQEGIPGYTILGYPGQNYEFLGFKMGEWDNENNKVQYNPDAKMADKNLRQAMGYALDIDQVGQSFYSGLRYRATSHIVPNFTDFHRDDLEGYPYDPDRAKQLLDEAGYEDIDGDGFREDPDGQPLEITYAARANSDVAEPIAQYFIQAWEEIGLNVSLLEGRLHEVNAFYDRIQEDDPAIDVFEAGFGVGTDPTPIEAFGPNQPFNYARYETEENNEYLQEFVSDEAFDDDYRKQVFYDWQEFFMDEVPLLPTFWRTELQLVNNRVSAYAHEELPGVDPDTYGLHQIELLAEEPLTE

SEQ ID NO: 5527 - DNA, 2031 bp, Alloiococcus otitidis; identical to SEQ ID NO: 5519
  CDS (43)..(2028)

SEQ ID NO: 5528 - protein, 662 aa, Alloiococcus otitidis
MKGEGYLIVRQALVYIPVFFFITHDACPKFFGTGKRRLGGIILLLNKKYALLASSTLLALTLAACGGESGQNNAGTPAGSGDQTEETNVEEASTVSSDDFESTVQNEGDPIDGGVAQVGLVADTAWTGIFDWQLYEINTDSTLNSYTLGSLLTVDENFELVGGEEWGTAADIDFDQENSSVTITVRDDVYWHDGEQVTADDVVFAHEIVGDPDYTGIRYGDDFKNIEGMEEFKDGQADTISGLDLSDDEMSVTIHYKEFDPTMTQAGGGVWSYAAPRHYLGDIPAEDLESHPNVRENPIGFGPFKVDNVVPGESVEFSAFEDFYDGAPKIDGVVVERVPTSGAIEALRAGEFDWVHSVPTDQFDTFQEGIPGYTILGYPGQNYEFLGFKMGEWDNENNKVQYNPDAKMADKNLRQAMGYALDIDQVGQSFYSGLRYRATSHIVPNFTDFHRDDLEGYPYDPDRAKQLLDEAGYEDIDGDGFREDPDGQPLEITYAARANSDVAEPIAQYFIQAWEEIGLNVSLLEGRLHEVNAFYDRIQEDDPAIDVFEAGFGVGTDPTPIEAFGPNQPFNYARYETEENNEYLQEFVSDEAFDDDYRKQVFYDWQEFFMDEVPLLPTFWRTELQLVNNRVSAYAHEELPGVDPDTYGLHQIELLAEEPLTE

SEQ ID NO: 5529 - DNA, 1887 bp, Alloiococcus otitidis
  CDS (31)..(1884)
gacagattgaaaaacataggaggaaaaatcatgtctcttaaaaagaaatatgccatcttagctagttctgctgccctaagtctcaccctagcggcttgtggcggcgaaggcgagccggttgatccaggccaggaaggagaaagcagccaagagacaacagaagaccaggccacacaagaacggtcgcctgaagattttgatgagacggttcaaaatgaaggagaagccatcgatggtgggattgcccaagttggtgtcttgtctgacacggcttggaccgggatttttgactggcaacactatgaaaatgaagctgatgcttctctgatgaactataccctaggtgaccttttggccatgaacgagaactatgaactggtgggtggcaaggaaaacggggctgcggctgatatcgaattcgatgaggataacgacaccgtcactatcacagtccatgatgacgtttactggcatgacggggaacaggtaactgctgacgacattgtctttgcccatgaaattgtgggaaacccagactacactggaatccgatatggggataactttaccaatgttcaaggaatggaagaatataaagcaggagaagctgattccatttctggtttagaattgtctgatgatgaaatgaccgtcaccatccactaccaacaagttgtcccatccatgaaacaagcgggccggggcgtttgggcatatgctgcaccacggcactacttagaagacatcccagctgacgaattagtgtcccaccccaatgtccgtgaaaaccccattggctttggtccctttaaggtcgataatgttgttccgggagagtctgttgaatactctgcttacgaagactaccacttaggtgaacccaagctagatgggattaccctggaacgtttgcaaccggctggagccattgaagccttgcgggcaggtgaatttgactgggtagactctgtaccgacagaccagtttgatattatcgaagagggtcttccaggctacaccatcctaggctatcctgaccgtggctatgacttcctcggctttaaactcggtgagtgggatgcagacgaaggcaaggttaaaatgaatccggatgccaaaatggctgacaaaaacctccgccaagccatggcttatgcccttgacttggaccaggtggctattaccttctccaacggtttaagtcaacgagccacttcccatattccttctaactttgcaagtttctatagagatgacttggaaggctacccttatgatccagacaaggccaaccaactcttggatgaagctggttatgaagatgtagatggcgacggcttccgggaagatccagacggccagcctcttgaaattacctatgctgctatgaccgggggtgacactgctgaaccaatttcccaatactacctccaagcttgggcggaagtgggcttaaatgtttccttgcttgaaggccgactccacgaatctaactcccactatgaccgaatccaaggggacgaccctgaaattgatgtctttgaagcaggttttggtgccctatctgacccaaccccatctgtcatctacgggccaaacgaacccattaacttcactcgctatgaaacggatgaaaacaatgaatacctccaagcctttgaggcagatgaagcctttgatgacgactaccgccagcaacttttccatgactggcaagaattctttatggatgaaattccgaccctaccgaccttctggtttacacagctagagatcgttaacgaccgggtctctgcctacgcccacagttctgttccacaagttgaccaagacacctatggactccatgaaattgaactcctagctgaagagcccatttctgaataa

SEQ ID NO: 5530 - protein, 618 aa, Alloiococcus otitidis
MSLKKKYAILASSAALSLTLAACGGEGEPVDPGQEGESSQETTEDQATQERSPEDFDETVQNEGEAIDGGIAQVGVLSDTAWTGIFDWQHYENEADASLMNYTLGDLLAMNENYELVGGKENGAAADIEFDEDNDTVTITVHDDVYWHDGEQVTADDIVFAHEIVGNPDYTGIRYGDNFTNVQGMEEYKAGEADSISGLELSDDEMTVTIHYQQVVPSMKQAGRGVWAYAAPRHYLEDIPADELVSHPNVRENPIGFGPFKVDNVVPGESVEYSAYEDYHLGEPKLDGITLERLQPAGAIEALRAGEFDWVDSVPTDQFDIIEEGLPGYTILGYPDRGYDFLGFKLGEWDADEGKVKMNPDAKMADKNLRQAMAYALDLDQVAITFSNGLSQRATSHIPSNFASFYRDDLEGYPYDPDKANQLLDEAGYEDVDGDGFREDPDGQPLEITYAAMTGGDTAEPISQYYLQAWAEVGLNVSLLEGRLHESNSHYDRIQGDDPEIDVFEAGFGALSDPTPSVIYGPNEPINFTRYETDENNEYLQAFEADEAFDDDYRQQLFHDWQEFFMDEIPTLPTFWFTQLEIVNDRVSAYAHSSVPQVDQDTYGLHEIELLAEEPISE

SEQ ID NO: 5531 - DNA, 1887 bp, Alloiococcus otitidis; identical to SEQ ID NO: 5529
  CDS (7)..(1884)

SEQ ID NO: 5532 - protein, 626 aa, Alloiococcus otitidis
MKNIGGKIMSLKKKYAILASSAALSLTLAACGGEGEPVDPGQEGESSQETTEDQATQERSPEDFDETVQNEGEAIDGGIAQVGVLSDTAWTGIFDWQHYENEADASLMNYTLGDLLAMNENYELVGGKENGAAADIEFDEDNDTVTITVHDDVYWHDGEQVTADDIVFAHEIVGNPDYTGIRYGDNFTNVQGMEEYKAGEADSISGLELSDDEMTVTIHYQQVVPSMKQAGRGVWAYAAPRHYLEDIPADELVSHPNVRENPIGFGPFKVDNVVPGESVEYSAYEDYHLGEPKLDGITLERLQPAGAIEALRAGEFDWVDSVPTDQFDIIEEGLPGYTILGYPDRGYDFLGFKLGEWDADEGKVKMNPDAKMADKNLRQAMAYALDLDQVAITFSNGLSQRATSHIPSNFASFYRDDLEGYPYDPDKANQLLDEAGYEDVDGDGFREDPDGQPLEITYAAMTGGDTAEPISQYYLQAWAEVGLNVSLLEGRLHESNSHYDRIQGDDPEIDVFEAGFGALSDPTPSVIYGPNEPINFTRYETDENNEYLQAFEADEAFDDDYRQQLFHDWQEFFMDEIPTLPTFWFTQLEIVNDRVSAYAHSSVPQVDQDTYGLHEIELLAEEPISE

SEQ ID NO: 5533 - DNA, 333 bp, Alloiococcus otitidis
  CDS (37)..(330)
accgtctcatcaaaatcttcaggcgaccgttcttgtgtggcctggtcttctgttgtctcttggctgctttctccttcctggcctggatcaaccggctcgccttcgccgccacaagccgctagggtgagacttagggcagcagaactagctaagatggcatatttctttttaagagacatgatttttcctcctatgtttttcaatctgtcctatttgaccttgtataaaatagggtcatttacaaactcaatcaatacaggaccccactatctttggaatggaccaagtagtggctttttaggcctctctttactaatcatctggcaaaagtga

SEQ ID NO: 5534 - protein, 98 aa, Alloiococcus otitidis
MAWSSVVSWLLSPSWPGSTGSPSPPQAARVRLRAAELAKMAYFFLRDMIFPPMFFNLSYLTLYKIGSFTNSINTGPHYLWNGPSSGFLGLSLLIIWQK

SEQ ID NO: 5535 - DNA, 2163 bp, Alloiococcus otitidis
  CDS (217)..(2160)
agaggtgtcttcatggaaaataatagttttctggagcaggccaagcgccaagttaaagctttttggaattggttggccccctaccttgtccgtttttggcagaattttagaaggtggtggcggaaatttcacctaaccaaggtctccctcctggctgttttaaccattgccttgggctttgggatttacttaaattacttatcccgaactgccaatgtggagaccttggaggctggtttagaagaaaaaacacaaattatagatgtcagtggccaagaggctggcagcctcaactctcagcagggaagccaggttgaaatagaagaaatttcagataatttagtccaggccgttattgcaacggaggacaagcgcttttaccggcaccggggttttgacttgatcggaatcggccgggctagtttgggctacttaacgacaggtcgtgtcgttgggggtgggtctaccatcactcagcagctggctaaaaatgcctacctgtccgcagaccagaccatcattcggaagttgcgggagttatttttagctatcgaaatcgagaagaattatagtaaagaccagattttaaccatgtacttaaacaatgtctacctaggccatggtgtctggggagttgaagatgggtcgcagaaatatttcggcaaaccggccagtgacttgactgtagcagaagctgctaccttggtcggcatgctcaaggggccttcagcctacaatcctattgacaattatgaccgggctatcgaccggcgcaataccgtcttacaactcatggttaacaatgattacttgacagaagaccagtatgatgagattagccagtatgggttaaacttagtagacaactatgatcccattgacgactaccgctatccctattattttgatgccgtgattagtgaagccatctacaaatacgggatggatgaagaagagttaatgaaccggggttacacgatttacactagcctgaaccaggccacccaacaagaattggatgcaagctaccgtaatgatagtctctttgccagtgctcaagatgggactcctgcccaggctgcttcagtggccttagacccccaaacgggtggagtcatggctgttgtaggtggtcgaggggactacaccttgcgtggctttaaccgggccacccagatgagacggcagccaggatcggtcattaaaccattaggtgtttatgccccagctcttgaaaatggctaccatcctgattccctcttacaagatgaattaacctcttatggggaaacagactacaccccaaccaacctgtccggtacctaccaaggccaggtacctctccactatgccctttctcagagtttaaatgcccctaccgtttggcttttaaatgagataggaattgacaagggtatggccaagcttaaagagtttggttggcaggtggatgaccaagacagacacctaggcagtattgccttaggtgggatgagccacgggatatctccgcttaatctagccagtgcctactccacctttgctaatgatggggttcggattgaaccccactttatcacccaaattgtggatgcaacaggcaatgtcctagttgacaacagccagtccaagcctcaccgggtcttgaaccagcaggttaacgatgagatgaaccagctcttgctggatgtctttgatacggggacggccgcagtcaatgaaccggacggctaccaggtggctggtaagacagggacaacccagagggaaaatgggcccggggcaaccgaccaatggattgtgggctacacaccagacctggttttagcctcctggatgggctttgatgaaagctctgagacccactacctgtctaattatgctaaccaaggggtgggtgtagcctttaaatatcaaatggaacacatcctgccttataccaatcaaaccgactttaatgttgacaagatcaacgaagaagatcaagaggacgatggtggtagcttcttagacttcctccagtcgcctgagctcaaggagaaggtcgattcggctatcgaatccaccaaggaaggtttggcggaaggttatgaccagttcaaacgtggtgccaaggaagttggcaaggaccttgtcgagtggctacgggaatttggtcaataa

SEQ ID NO: 5536 - protein, 648 aa, Alloiococcus otitidis
METLEAGLEEKTQIIDVSGQEAGSLNSQQGSQVEIEEISDNLVQAVIATEDKRFYRHRGFDLIGIGRASLGYLTTGRVVGGGSTITQQLAKNAYLSADQTIIRKLRELFLAIEIEKNYSKDQILTMYLNNVYLGHGVWGVEDGSQKYFGKPASDLTVAEAATLVGMLKGPSAYNPIDNYDRAIDRRNTVLQLMVNNDYLTEDQYDEISQYGLNLVDNYDPIDDYRYPYYFDAVISEAIYKYGMDEEELMNRGYTIYTSLNQATQQELDASYRNDSLFASAQDGTPAQAASVALDPQTGGVMAVVGGRGDYTLRGFNRATQMRRQPGSVIKPLGVYAPALENGYHPDSLLQDELTSYGETDYTPTNLSGTYQGQVPLHYALSQSLNAPTVWLLNEIGIDKGMAKLKEFGWQVDDQDRHLGSIALGGMSHGISPLNLASAYSTFANDGVRIEPHFITQIVDATGNVLVDNSQSKPHRVLNQQVNDEMNQLLLDVFDTGTAAVNEPDGYQVAGKTGTTQRENGPGATDQWIVGYTPDLVLASWMGFDESSETHYLSNYANQGVGVAFKYQMEHILPYTNQTDFNVDKINEEDQEDDGGSFLDFLQSPELKEKVDSAIESTKEGLAEGYDQFKRGAKEVGKDLVEWLREFGQ

SEQ ID NO: 5537 - DNA, 2163 bp, Alloiococcus otitidis; identical to SEQ ID NO: 5535
  CDS (13)..(2160)

SEQ ID NO: 5538 - protein, 716 aa, Alloiococcus otitidis
MENNSFLEQAKRQVKAFWNWLAPYLVRFWQNFRRWWRKFHLTKVSLLAVLTIALGFGIYLNYLSRTANVETLEAGLEEKTQIIDVSGQEAGSLNSQQGSQVEIEEISDNLVQAVIATEDKRFYRHRGFDLIGIGRASLGYLTTGRVVGGGSTITQQLAKNAYLSADQTIIRKLRELFLAIEIEKNYSKDQILTMYLNNVYLGHGVWGVEDGSQKYFGKPASDLTVAEAATLVGMLKGPSAYNPIDNYDRAIDRRNTVLQLMVNNDYLTEDQYDEISQYGLNLVDNYDPIDDYRYPYYFDAVISEAIYKYGMDEEELMNRGYTIYTSLNQATQQELDASYRNDSLFASAQDGTPAQAASVALDPQTGGVMAVVGGRGDYTLRGFNRATQMRRQPGSVIKPLGVYAPALENGYHPDSLLQDELTSYGETDYTPTNLSGTYQGQVPLHYALSQSLNAPTVWLLNEIGIDKGMAKLKEFGWQVDDQDRHLGSIALGGMSHGISPLNLASAYSTFANDGVRIEPHFITQIVDATGNVLVDNSQSKPHRVLNQQVNDEMNQLLLDVFDTGTAAVNEPDGYQVAGKTGTTQRENGPGATDQWIVGYTPDLVLASWMGFDESSETHYLSNYANQGVGVAFKYQMEHILPYTNQTDFNVDKINEEDQEDDGGSFLDFLQSPELKEKVDSAIESTKEGLAEGYDQFKRGAKEVGKDLVEWLREFGQ

SEQ ID NO: 5539 - DNA, 1050 bp, Alloiococcus otitidis
  CDS (19)..(1047)
acaaaattatttacgtgtatggaggaattaatagtgccattattagacttaaatgaccatgaccgcgttcaggaatatgaggactttgtccaaaaccacccccagggccacctgatgcagtctaccaaatggatccaggttaaggaaggctgggacggtgactatgtttaccttaccgatgaccaagaccggatcaaggcatgcttgtccattctatcagtcaaaaatgacggagaacatgccttcttatatgcgccaagagggccggtttgtgactttcatgatacagacttggtgaccgacttaattaaggaagcccaagtcgtagcggacaagcacaaggcctttttgttgcggatggacccggaaacccttcatgatcctgacctggtcgaaaaataccgcgatttaggctatactttccggtcagctgagcaagaagatgaacacgtcttctccaacccccgcttccacatgatgacggacttaaggggtcatgatgaagaaagcttgctgatggccttcaccagcaataaccggcgcaagatccgcaaaacttacaaaaataacctccagacccactatctgaccgtggatgatgagggttatgaccaggccttggatgacttttatgaattgacccaaataatggcagaacggcaagggattactcaccggcccaaagactactttgaccggttaatgcacagctttgaggatgctaaattgttccagacctaccacgaagatgacctcctagctacttgtatcttggtgagctataataaaaaatccttctacatgtatgcagcttcttccaacaaaaaacgaaatttaaatgggtctttgcaagaaaattacgaagccatgaagtatgccttggcccgaggaagcgaagaatatgatatgggtggggtctttggctttgacaagtcggacggcctctaccggtttaaaaaaatctttaccggtcatgaagggctgaaagaatttatgggtgaattggatgtggtctatgaccaagacctatacgacgattttatttcttaa

SEQ ID NO: 5540 - protein, 343 aa, Alloiococcus otitidis
MEELIVPLLDLNDHDRVQEYEDFVQNHPQGHLMQSTKWIQVKEGWDGDYVYLTDDQDRIKACLSILSVKNDGEHAFLYAPRGPVCDFHDTDLVTDLIKEAQVVADKHKAFLLRMDPETLHDPDLVEKYRDLGYTFRSAEQEDEHVFSNPRFHMMTDLRGHDEESLLMAFTSNNRRKIRKTYKNNLQTHYLTVDDEGYDQALDDFYELTQIMAERQGITHRPKDYFDRLMHSFEDAKLFQTYHEDDLLATCILVSYNKKSFYMYAASSNKKRNLNGSLQENYEAMKYALARGSEEYDMGGVFGFDKSDGLYRFKKIFTGHEGLKEFMGELDVVYDQDLYDDFIS

SEQ ID NO: 5541 - DNA, 1050 bp, Alloiococcus otitidis
  CDS (82)..(1047)
aatcaatgttttttcggaagaaggcctagtcgccaaggctatcttgaccgggcgcttgataatgaattaaaggagcataccatgactcaagatgagcaaaatcaacttcaagctatattgaaaagtatcaaaaaagccgataagataattatccaccgccacgtccggcctgacccggatgccatcgggtcccaggttggcctagctgaaattatccgggcaaatttccccgataagactgttttgacagccgggtctgggagcgaccacttgaaatttttagcagacttttctggagtccaggctaatgaatacgatgacgccctagtgattgtcactgatacagccaatattgaccggatcgatggcagggaaaatattgattttgaccaaaaccaagtcatcaaaattgaccaccaccctttggatgacccttatggtaacttggcttgggtcaagccttctgcttcgtcttgttcagaaatgattgcagacttttactttgcctttgaggatagcttgaccctgcctgacaatgctgccagacttttatatggagggattgtaggggataccggtcgctttgaattcccagccactactccccacactatgcaggtggcaggtcgtttaatggaatctaactttgaccatactgacctcctcaaccaactctacgaagtcagcccccaagtggctagtctaaacggctatgtcttagaccaggtcaaggtggaagatggtgtgggagcagtagtgatcgaccaagccaaactacaggaattaggtttaagggatgcagacactaatgccattgtcaatgttcctcgtcccattgcgggagtcttgtgttggggcatatttgtcgagcaaacagacgggtcctaccgttgccgtttacggtcaaaaggaccagctattaaccaaattgctaaagaccatggtggaggggggcaccccatggctagtggggcctatgcctacagtcatgaagaaattcaagctattattgatcaatttaaacaagctgttaaagactttcagtcctaa

SEQ ID NO: 5542 - protein, 322 aa, Alloiococcus otitidis
MTQDEQNQLQAILKSIKKADKIIIHRHVRPDPDAIGSQVGLAEIIRANFPDKTVLTAGSGSDHLKFLADFSGVQANEYDDALVIVTDTANIDRIDGRENIDFDQNQVIKIDHHPLDDPYGNLAWVKPSASSCSEMIADFYFAFEDSLTLPDNAARLLYGGIVGDTGRFEFPATTPHTMQVAGRLMESNFDHTDLLNQLYEVSPQVASLNGYVLDQVKVEDGVGAVVIDQAKLQELGLRDADTNAIVNVPRPIAGVLCWGIFVEQTDGSYRCRLRSKGPAINQIAKDHGGGGHPMASGAYAYSHEEIQAIIDQFKQAVKDFQS

SEQ ID NO: 5543 - DNA, 327 bp, Alloiococcus otitidis
  CDS (31)..(324)
gggtcatccaaagggtggtggtcaattttgatgacttggttttggtcaaaatcaatattttccctgccatcgatccggtcaatattggctgtatcagtgacaatcactagggcgtcatcgtattcattagcctggactccagaaaagtctgctaaaaatttcaagtggtcgctcccagacccggctgtcaaaacagtcttatcggggaaatttgcccggataatttcagctaggccaacctgggacccgatggcatccgggtcaggccggacgtggcggtggataattatcttatcggcttttttgatacttttcaatatagcttga

SEQ ID NO: 5544 - protein, 98 aa, Alloiococcus otitidis
MTWFWSKSIFSLPSIRSILAVSVTITRASSYSLAWTPEKSAKNFKWSLPDPAVKTVLSGKFARIISARPTWDPMASGSGRTWRWIIILSAFLILFNIA

SEQ ID NO: 5545 - DNA, 327 bp, Alloiococcus otitidis; identical to SEQ ID NO: 5543
  CDS (28)..(324)

SEQ ID NO: 5546 - protein, 99 aa, Alloiococcus otitidis
MMTWFWSKSIFSLPSIRSILAVSVTITRASSYSLAWTPEKSAKNFKWSLPDPAVKTVLSGKFARIISARPTWDPMASGSGRTWRWIIILSAFLILFNIA

SEQ ID NO: 5547 - DNA, 1302 bp, Alloiococcus otitidis
  CDS (1)..(1299)
atggtaaccaagcatgagaagattattaactatatcaagacgatcccggtaggcaataaattatctgtacggaacattgccaaagaaatgagtgtttcggacgggacagcctaccgggccatcaaagatgccgaagaaaagggcttggttcaagccattgaacgagttggcaccatccggaccaagcagacgggtcgggaccaggtgaaaaaattaacttaccaggaagtcgttaatgtgattgacggcgaagtgttgggtggtcaggaaggcctcaataaatccttgaaccggttttttattggagcgatggaaaaagaagccatgctccgctatatctctaaagactctttgatgatcgtcgggaaccgccaagaagtccaggaactttcccttaaaaatggggccgctattctgattactgggggctttattcccgaaaaagcggtgattgatttggccaaccaattggccttgcctgtattatcgacttcttatgacacttttacggttgcttccatgattaatcggtctctcagtgaccaagttatccggaaagaaatcttattgatcaagaatgtctacacccaactggaggacaccgattacttaaagtcagggtcaacggtttacgattataagtttgtagcccaacaacatgaccactcccgcctacctgtggtcaacgaccataaccgcttggtagggattgtcacggcccgggatgtgattggcaaggatgatagtatggctattaatagcttgatgaccaaaaaccccaagctggccaaggagtacgacagcgttgcaagcgtggcccatgccatgatttgggagggatttgacctacttccggtagtagctgatgacttaaccttgattgggattatctcccgccaggatattatgaaagtcatgcaaagccaggcccaccagccccatttaaaagacaccatttccgaccaggtcaaagacttgatctccgatgtgggcaacaatgagtttgtggtcagtgtgagtccacagatgacggataatttgggatccatctcttttggagttttaacggagatcctttcccatgtttcttccatggtggtctacaaggaaacaaaccataatatcaccttagaccaaatccaactccactactttaagtatatccccttagaagctgaaatattaattaaggtggatatttttgacaagtctcgtaagaacgcccgtgctgaaatcaatgttttttcggaagaaggcctagtcgccaaggctatcttgaccgggcgcttgataatgaattaa

SEQ ID NO: 5548 - protein, 433 aa, Alloiococcus otitidis
MVTKHEKIINYIKTIPVGNKLSVRNIAKEMSVSDGTAYRAIKDAEEKGLVQAIERVGTIRTKQTGRDQVKKLTYQEVVNVIDGEVLGGQEGLNKSLNRFFIGAMEKEAMLRYISKDSLMIVGNRQEVQELSLKNGAAILITGGFIPEKAVIDLANQLALPVLSTSYDTFTVASMINRSLSDQVIRKEILLIKNVYTQLEDTDYLKSGSTVYDYKFVAQQHDHSRLPVVNDHNRLVGIVTARDVIGKDDSMAINSLMTKNPKLAKEYDSVASVAHAMIWEGFDLLPVVADDLTLIGIISRQDIMKVMQSQAHQPHLKDTISDQVKDLISDVGNNEFVVSVSPQMTDNLGSISFGVLTEILSHVSSMVVYKETNHNITLDQIQLHYFKYIPLEAEILIKVDIFDKSRKNARAEINVFSEEGLVAKAILTGRLIMN

SEQ ID NO: 5549 - DNA, 465 bp, Alloiococcus otitidis
  CDS (7)..(462)
accaccatggaagaaacatgggaaaggatctccgttaaaactccaaaagagatggatcccaaattatccgtcatctgtggactcacactgaccacaaactcattgttgcccacatcggagatcaagtctttgacctggtcggaaatggtgtcttttaaatggggctggtgggcctggctttgcatgactttcataatatcctggcgggagataatcccaatcaaggttaagtcatcagctactaccggaagtaggtcaaatccctcccaaatcatggcatgggccacgcttgcaacgctgtcgtactccttggccagcttggggtttttggtcatcaagctattaatagccatactatcatccttgccaatcacatcccgggccgtgacaatccctaccaagcggttatggtcgttgaccacaggtaggcgggagtggtcatgttgttgggctacaaacttataa

SEQ ID NO: 5550 - protein, 152 aa, Alloiococcus otitidis
MEETWERISVKTPKEMDPKLSVICGLTLTTNSLLPTSEIKSLTWSEMVSFKWGWWAWLCMTFIISWREIIPIKVKSSATTGSRSNPSQIMAWATLATLSYSLASLGFLVIKLLIAILSSLPITSRAVTIPTKRLWSLTTGRREWSCCWATNL

SEQ ID NO: 5551 - DNA, 1269 bp, Alloiococcus otitidis
  CDS (145)..(1266)
ggaccaaccaacccagtcaaacagaggaatcagaagaagctacagaataaactaaaaaagacaggcaactgtcttttttattatgtgtttaatctgggaatctgttgtataataaaggtacagttttcaaagaggtgtagtagtatgaagtatggcatcctaacctttgaagaaccgaaacgggatacctctcggaaaatcatccatattgacatggatgccttttatgcatcagttgaaattagggaacagccagacctgaaggataagccggttgtcattgcccgccacccacaggaaacagaggggaggggggtagtgaccacagccaattatattgcccgccagtacggtatccactctgctatgtcctcggctaaggcctatcaattgtgcccccaagcgacttttgtcccgcctcactttgacctctatcggacaatgtcggaccagatccaccaaatcttccaccagtacaccgacctcgtccaggccatttccctggatgaagccttcctagatgtgacgaaaaataagcatggcatgaagtctgctacccggattgcgcaaaagattcaagcagagatcgtccaggccactcagctgaccgcatcagccggtgtttcctataataaattcattgccaaaattgcttccgactaccgcaagcctggtggcctcaccgtggtagacccggatgccgcccatgacttcttgatggccctacccattgacaagttttttggcgtaggcgagaagaccgtacaaaagatgcatgatttgggtatctattctggctcggacctctaccaaatatcggattatgacctggcccagatttttggtaaaatgggtcattccctctaccgaaaagtcagggggattgacgacagcccggtcaacccaatccgggatcggaaatcagtgggcaaggagcggacctaccagactgagatttacgatgaagaccaggttatccagtctctccggtccctgtcgcaaaaagtgtcacaggccctagccaaccaccacctccatggcaagaccctggtgatcaaggtgcggtacgaggactttaccacccacaccaaacgtaagaccagcctgcaataccttcaatcagcagatgacctcttcaacctggcttatgacttgtggactgaatttggccaggtcgaccgaggtgtccgcctcctcggagtcaccgttaccaatattcagtccagtttatacgaaaatatccccttacaactttgggaggaagactag

SEQ ID NO: 5552 - protein, 374 aa, Alloiococcus otitidis
MKYGILTFEEPKRDTSRKIIHIDMDAFYASVEIREQPDLKDKPVVIARHPQETEGRGVVTTANYIARQYGIHSAMSSAKAYQLCPQATFVPPHFDLYRTMSDQIHQIFHQYTDLVQAISLDEAFLDVTKNKHGMKSATRIAQKIQAEIVQATQLTASAGVSYNKFIAKIASDYRKPGGLTVVDPDAAHDFLMALPIDKFFGVGEKTVQKMHDLGIYSGSDLYQISDYDLAQIFGKMGHSLYRKVRGIDDSPVNPIRDRKSVGKERTYQTEIYDEDQVIQSLRSLSQKVSQALANHHLHGKTLVIKVRYEDFTTHTKRKTSLQYLQSADDLFNLAYDLWTEFGQVDRGVRLLGVTVTNIQSSLYENIPLQLWEED

SEQ ID NO: 5553 - DNA, 1269 bp, Alloiococcus otitidis; identical to SEQ ID NO: 5551
  CDS (85)..(1266)

SEQ ID NO: 5554 - protein, 394 aa, Alloiococcus otitidis
MFNLGICCIIKVQFSKRCSSMKYGILTFEEPKRDTSRKIIHIDMDAFYASVEIREQPDLKDKPVVIARHPQETEGRGVVTTANYIARQYGIHSAMSSAKAYQLCPQATFVPPHFDLYRTMSDQIHQIFHQYTDLVQAISLDEAFLDVTKNKHGMKSATRIAQKIQAEIVQATQLTASAGVSYNKFIAKIASDYRKPGGLTVVDPDAAHDFLMALPIDKFFGVGEKTVQKMHDLGIYSGSDLYQISDYDLAQIFGKMGHSLYRKVRGIDDSPVNPIRDRKSVGKERTYQTEIYDEDQVIQSLRSLSQKVSQALANHHLHGKTLVIKVRYEDFTTHTKRKTSLQYLQSADDLFNLAYDLWTEFGQVDRGVRLLGVTVTNIQSSLYENIPLQLWEED

SEQ ID NO: 5555 - DNA, 387 bp, Alloiococcus otitidis
  CDS (76)..(384)
gattataataagaaaatttgtggaggaatgcaggtaatggaatttattataagtattttacctttaatactttttatggtattaatttacttcttaactatccggccccagaaaaaacgccaagaagaacacaaggccatgattgaccggatgcaaaagggtgacacagttgtgactattggtggcttgcacggggtagtggacgaacaaaatgattctgagcgaacggtcgtcttagactgtgaaggcatctacctcacctttgagaaaagagccattgcccaagtcttatcgaaagcagatagcccaagaagcggcgcccaagctgaagacttagggaccaaccaacccagtcaaacagaggaatcagaagaagctacagaataa

SEQ ID NO: 5556 - protein, 103 aa, Alloiococcus otitidis
MVLIYFLTIRPQKKRQEEHKAMIDRMQKGDTVVTIGGLHGVVDEQNDSERTVVLDCEGIYLTFEKRAIAQVLSKADSPRSGAQAEDLGTNQPSQTEESEEATE

SEQ ID NO: 5557 - DNA, 387 bp, Alloiococcus otitidis; identical to SEQ ID NO: 5555
  CDS (28)..(384)

SEQ ID NO: 5558 - protein, 119 aa, Alloiococcus otitidis
MQVMEFIISILPLILFMVLIYFLTIRPQKKRQEEHKAMIDRMQKGDTVVTIGGLHGVVDEQNDSERTVVLDCEGIYLTFEKRAIAQVLSKADSPRSGAQAEDLGTNQPSQTEESEEATE

SEQ ID NO: 5559 - DNA, 1020 bp, Alloiococcus otitidis
  CDS (7)..(1017)
gcagttatggaagaagagaaccggcttgtttccagccaactagaccaagcggaagaaacattcgaaaaatccctaagaccccgtttcttatcccaatatattggccaggataatgtcaaaaaagaattatcagtctatattcaagcggcaaaagatcgacaagaggccttagaccatgtcctactctacggcccacctggcttgggtaagaccaccctagccatggtgattgccaacgaaatggaaaccagcatccggaccacatctggcccagccattgacaagcctggagacctggttgctctcttaaatgacctggacccaggggggattttatttatcgatgaaatccaccgcctgccccgggtgattgaagagatgctctattcagccatggaagacttttacattgatatcattatcggggaaggggagtcagcccacccggttcacttccccctcccgccttttaccttgattggggctaccacccgggctggttccttgtcagctcctttgagagaccggtttgggatcttagcccatatggaatattacagtcaggaagacttagaccaggttgtgcgacggtcagcccaggtcattgccactgaagtccatccgaaaggcagtttagaaattgccggacggtcccggggcaccccccggattgccaaccgcctcctaaaacgggtcagggactttgcccaggtccaaggcgatgggaccatcacccaagaccttgcccgccagtctttggacctcttgggagttgatgacatgggtttggaccagctagaccaaaaattactcaagatgatcatcaccctctaccagggtggccccattggcttaaacactttagcagctaacattggagaagagatggagaccattgaagatatggtagaacccttccttttgaagactggcctactcaaccggacggcccggggtcgggtggcaacccaaaaggcctatgaccactttcaacttcccagtcctgaccaagagaagtaa

SEQ ID NO: 5560 - protein, 337 aa, Alloiococcus otitidis
MEEENRLVSSQLDQAEETFEKSLRPRFLSQYIGQDNVKKELSVYIQAAKDRQEALDHVLLYGPPGLGKTTLAMVIANEMETSIRTTSGPAIDKPGDLVALLNDLDPGGILFIDEIHRLPRVIEEMLYSAMEDFYIDIIIGEGESAHPVHFPLPPFTLIGATTRAGSLSAPLRDRFGILAHMEYYSQEDLDQVVRRSAQVIATEVHPKGSLEIAGRSRGTPRIANRLLKRVRDFAQVQGDGTITQDLARQSLDLLGVDDMGLDQLDQKLLKMIITLYQGGPIGLNTLAANIGEEMETIEDMVEPFLLKTGLLNRTARGRVATQKAYDHFQLPSPDQEK

SEQ ID NO: 5561 - DNA, 654 bp, Alloiococcus otitidis
  CDS (49)..(651)
gtttatctgtggtataataaaatgactattggaaaaagtggtgaaagtatgtatgaatacatggtagggacagtcgttgatgtccaacccagctacttggttttacaagtggggggagtgggctaccaccttttaatggctaaccccttccgcctgaacgaccggctgggccaagaagtgaagatttacctttacctgaatgttagtcaagaccagcttagcctctttggttttccccgccaggatgaaaaaagcttgtttctaaaattaatcaatgtctcaggtattgggcccaaaagtgctttggctatcctggccaatgaagaccatgctggcttaatccaggcgattgaaaatgaagaccgacagtttttgcaacgctttcccggggtaggaaaaaaaacagcctctcagattgttctggacctcaaagggaacttgcaagacttgacttccgcttctttcccccagtcgtcagccgaggccaaagaagctgcgaccaatccagccttagaagaagccctcttggccctagaagcactgggttacagcaaaagagaagtaaaaaaagtcaaaaaggccttagaggaccaagatgaccagaccagtgatgcctatatccggcaaggacttgacatgctcttgcaccagtaa

SEQ ID NO: 5562 - protein, 201 aa, Alloiococcus otitidis
MYEYMVGTVVDVQPSYLVLQVGGVGYHLLMANPFRLNDRLGQEVKIYLYLNVSQDQLSLFGFPRQDEKSLFLKLINVSGIGPKSALAILANEDHAGLIQAIENEDRQFLQRFPGVGKKTASQIVLDLKGNLQDLTSASFPQSSAEAKEAATNPALEEALLALEALGYSKREVKKVKKALEDQDDQTSDAYIRQGLDMLLHQ

SEQ ID NO: 5563 - DNA, 654 bp, Alloiococcus otitidis; identical to SEQ ID NO: 5561
  CDS (22)..(651)

SEQ ID NO: 5564 - protein, 210 aa, Alloiococcus otitidis
MTIGKSGESMYEYMVGTVVDVQPSYLVLQVGGVGYHLLMANPFRLNDRLGQEVKIYLYLNVSQDQLSLFGFPRQDEKSLFLKLINVSGIGPKSALAILANEDHAGLIQAIENEDRQFLQRFPGVGKKTASQIVLDLKGNLQDLTSASFPQSSAEAKEAATNPALEEALLALEALGYSKREVKKVKKALEDQDDQTSDAYIRQGLDMLLHQ

SEQ ID NO: 5565 - DNA, 1386 bp, Alloiococcus otitidis
  CDS (139)..(1383)
aaaggaatggagcgaatgcccgtggaagtttccgggaggtcccttgccatacacctcatcgtcttattggttttactcgccattaatgcctttgtttcggctggtgagatagcttatatttccttgagccagcaaaacatgaacgatttggccttggaagacaataagagggcgaaaaagcttttaaaattaatcagtgaatcagaccagctcattagctcgcttcagtcagctatcactctgactgaagtcttagctagtgtttatttttctgtttttgtctatgacttgatccagcccttagactttttaccgggtccacttgattggctcttgccctttgccttggttgtctttttgctgacccttatatttatcgtccttggcgaaaaaattcctaaacgcctagcagcccaagatcctgaccaggctgccttgcgtttggtgcatggggttgcctttatcgatagcttgatgatcccctttgtgtggttggttagtgtctctaccaagggcttgcagaaggtattgccctatgactttgactacaataccgaacgttttacccgggatgagatgcagtccattttggttgaaagccacaatgaggggtccattgacatggaagaatttactatgctagagggcgttttatcgctgaatgataaaattgcccgggctgtcatggtgccaagaactgatatccagatggttaatattgacgacgatcccaaggagaatatcgatgaaattttagaaagtcccttttcccggattcccatctaccaaggtgaccgggacaatgtcgttggcatcttgcacaccaagtccctcctaaaatctatccgggttaaggatgaaagagagattgacctcttagccttgtcctatgaccccttgtttgttccagcaaccatgtatatcgatgacttgctgatcgactttaaacgacaacagcagcacatggccatcttaatggatgaatacggcggggttgagggcattgtgaccatggaagaccttctggaagaaattgtcggcgaaattgatgacgaaaacgatgtccaacacttaaccgacattcgtcaagtagacaaaaacaatgcctttatcaatgctgggatcgatattgaagaatttaatgactactacaaggtcaatatcccccatgaggatatcgaaaccttggctggtgccatcaccagggaaattggttttgtcccatctagtacggaccggtttaagttaagggtgggcaactatgttatccagaccttgagagctgaatcgggccggatctatacggtcaaggtgacagctgacccagcccggtcaatcattaccgattatgtgattgccgaaagtggggacagtcaagaggtctag

SEQ ID NO: 5566 - protein, 415 aa, Alloiococcus otitidis
MNDLALEDNKRAKKLLKLISESDQLISSLQSAITLTEVLASVYFSVFVYDLIQPLDFLPGPLDWLLPFALVVFLLTLIFIVLGEKIPKRLAAQDPDQAALRLVHGVAFIDSLMIPFVWLVSVSTKGLQKVLPYDFDYNTERFTRDEMQSILVESHNEGSIDMEEFTMLEGVLSLNDKIARAVMVPRTDIQMVNIDDDPKENIDEILESPFSRIPIYQGDRDNVVGILHTKSLLKSIRVKDEREIDLLALSYDPLFVPATMYIDDLLIDFKRQQQHMAILMDEYGGVEGIVTMEDLLEEIVGEIDDENDVQHLTDIRQVDKNNAFINAGIDIEEFNDYYKVNIPHEDIETLAGAITREIGFVPSSTDRFKLRVGNYVIQTLRAESGRIYTVKVTADPARSIITDYVIAESGDSQEV

SEQ ID NO: 5567 - DNA, 1386 bp, Alloiococcus otitidis; identical to SEQ ID NO: 5565
  CDS (7)..(1383)

SEQ ID NO: 5568 - protein, 459 aa, Alloiococcus otitidis
MERMPVEVSGRSLAIHLIVLLVLLAINAFVSAGEIAYISLSQQNMNDLALEDNKRAKKLLKLISESDQLISSLQSAITLTEVLASVYFSVFVYDLIQPLDFLPGPLDWLLPFALVVFLLTLIFIVLGEKIPKRLAAQDPDQAALRLVHGVAFIDSLMIPFVWLVSVSTKGLQKVLPYDFDYNTERFTRDEMQSILVESHNEGSIDMEEFTMLEGVLSLNDKIARAVMVPRTDIQMVNIDDDPKENIDEILESPFSRIPIYQGDRDNVVGILHTKSLLKSIRVKDEREIDLLALSYDPLFVPATMYIDDLLIDFKRQQQHMAILMDEYGGVEGIVTMEDLLEEIVGEIDDENDVQHLTDIRQVDKNNAFINAGIDIEEFNDYYKVNIPHEDIETLAGAITREIGFVPSSTDRFKLRVGNYVIQTLRAESGRIYTVKVTADPARSIITDYVIAESGDSQEV

SEQ ID NO: 5569 - DNA, 237 bp, Alloiococcus otitidis
  CDS (1)..(234)
atgggaatccgggaaaagggactttctaaaatttcatcgatattctccttgggatcgtcgtcaatattaaccatctggatatcagttcttggcaccatgacagcccgggcaattttatcattcagcgataaaacgccctctagcatagtaaattcttccatgtcaatggacccctcattgtggctttcaaccaaaatggactgcatctcatcccgggtaaaacgttcggtattgtag

SEQ ID NO: 5570 - protein, 78 aa, Alloiococcus otitidis
MGIREKGLSKISSIFSLGSSSILTIWISVLGTMTARAILSFSDKTPSSIVNSSMSMDPSLWLSTKMDCISSRVKRSVL

SEQ ID NO: 5571 - DNA, 438 bp, Alloiococcus otitidis
  CDS (7)..(435)
tattttatggataaaaaagacttaaaagaccgtttaactaaagaacaatacgaagtaacccaaaatgaagcaactgaacgtgcttatactggggaatacgacgacttttatgaagaaggcatctatgtcgatgtggtcagtggcgaacccctcttttcttccaaagacaagtatgatgctggttgcggctggccatcctttacccaaccgatcgaaaaacgtattttacaagaaaaaagagaccggaaatttggcatggaaagaacagaagttagaagtaaagaagccgactcccacttgggtcacgttttcactgatggtcctcgcgacaagggtggtttacgctactgtattaactcagcagccctccgctttgttcccaaagatgaattagctgaacagggctatgaagagtatgttgaccattttgaaaactaa

SEQ ID NO: 5572 - protein, 143 aa, Alloiococcus otitidis
MDKKDLKDRLTKEQYEVTQNEATERAYTGEYDDFYEEGIYVDVVSGEPLFSSKDKYDAGCGWPSFTQPIEKRILQEKRDRKFGMERTEVRSKEADSHLGHVFTDGPRDKGGLRYCINSAALRFVPKDELAEQGYEEYVDHFEN

SEQ ID NO: 5573 - DNA, 1983 bp, Alloiococcus otitidis
  CDS (28)..(1980)
gaggattgtatgagtcaaattcagataatgccagctagtttggcagaccagattgcagccggtgaagtggtggaacggcctgcttcagttgtcaaagaattggtggaaaacgctatcgatgcaggtgcagaccaaatcgatgtagctattgaagagtcgggcttaaaattaatccgggtgacggataatggcaaaggaatagcctatgacgaggtcgacaaggcctttcagcgtcacgccaccagtaaactccttagtcctgaatccctattccggatcaaaacgctaggctttcggggagaggccctcccgagtattgcttcagtgtcggaagtccacattgaatcagcccaggaaggtcacaaaggtcgggccctccacctttctggaggtgagattatctcctctcaatcggcttctgctcggtctggcaccatgatccaagtggaagacctcttttttaacaccccagcccggcttaaacacttgaagtccatgcagacagaattaactcatatcacttctaccctcaaccgctttgctttgactcacccaggcgtctcctttaagctgatacatgacggcatgaccctgatgaatacaagtggtagtggcaagctccagcaagccattgctggtatttacggggttcagatagccaagaaaatgctcaaggttgaggcgtccaactttaactttgacctgacaggctatgtgtccttaccggaagtatcccggtccaaccggtcttacatgaccattatcgtcaatgaccgctatatcaaaaactatgccctggcccgggccatcgtccaaggctatgggtccaagctaatggtgggccgttttcccctagctgtcattaaaattgatatggacccccaactagtggacgtcaatgtccacccaaccaaggaccaggtgcggattagtggcgaaaaagaccttgctgacttaatcacaggggcaattcgaaagatcctagaccaaacagtccggataccagatggcttggaaaatattaaccaaaaccagatcaaagtaagggatagacaggaaaatgctgtccagggtcgcttggactttaatcaaagtgacaatcatgccccctatcaggaaaatccaaaaccaagcccgacttttagtcaggcaagtcatgaatccagtcaagttggtcatttgtccgattccttccaaccctaccaagaccaagaaaggaaagatttagcttctagccagcaagaccagccgactgactctcttgggccaggtcagggcaggggagagactcagacaatcttgggccatgaaagtggcgattttgtcaagcaagcccaagaccagttacggaaggatggtgctttagaaggggagggtttgacccaggaccaagagggttttcccgacctggactatattggccagatgcacggaacctatctctttgcccagaatgaaatcggcctttatatcattgaccaacacgcggcccaggagcggattaagtatgagtactaccgtgaagagattgctagctcggggactgcccagcaaaccctcctggagccggttgtcttagactacccgactgatgattacctgaccatctgccagcacaaggatgacctgagccgggccggaattgacttggaagactttggtcagcgaacttttattgtaaaaagtcatccttcttggtttattaatggccaagaagaagctacaataaaagaaatgatagactttgtcttaacccaccagcacatttccactaaggaatttcgggaagcaacggctatcatgatgagttgcaagcggtccatcaaggctaaccactacttgagcgacttagaagcccgggccttgatccaggatttaaaatcttgccaaaatccctataattgcccacatggcagaccagtcatggtaaaattgactaaccgggatatggagaaaatgtttaaacggatacaagatagatag

SEQ ID NO: 5574 - protein, 651 aa, Alloiococcus otitidis
MPASLADQIAAGEVVERPASVVKELVENAIDAGADQIDVAIEESGLKLIRVTDNGKGIAYDEVDKAFQRHATSKLLSPESLFRIKTLGFRGEALPSIASVSEVHIESAQEGHKGRALHLSGGEIISSQSASARSGTMIQVEDLFFNTPARLKHLKSMQTELTHITSTLNRFALTHPGVSFKLIHDGMTLMNTSGSGKLQQAIAGIYGVQIAKKMLKVEASNFNFDLTGYVSLPEVSRSNRSYMTIIVNDRYIKNYALARAIVQGYGSKLMVGRFPLAVIKIDMDPQLVDVNVHPTKDQVRISGEKDLADLITGAIRKILDQTVRIPDGLENINQNQIKVRDRQENAVQGRLDFNQSDNHAPYQENPKPSPTFSQASHESSQVGHLSDSFQPYQDQERKDLASSQQDQPTDSLGPGQGRGETQTILGHESGDFVKQAQDQLRKDGALEGEGLTQDQEGFPDLDYIGQMHGTYLFAQNEIGLYIIDQHAAQERIKYEYYREEIASSGTAQQTLLEPVVLDYPTDDYLTICQHKDDLSRAGIDLEDFGQRTFIVKSHPSWFINGQEEATIKEMIDFVLTHQHISTKEFREATAIMMSCKRSIKANHYLSDLEARALIQDLKSCQNPYNCPHGRPVMVKLTNRDMEKMFKRIQDR

SEQ ID NO: 5575 - DNA, 1983 bp, Alloiococcus otitidis; identical to SEQ ID NO: 5573
  CDS (10)..(1980)

SEQ ID NO: 5576 - protein, 657 aa, Alloiococcus otitidis
MSQIQIMPASLADQIAAGEVVERPASVVKELVENAIDAGADQIDVAIEESGLKLIRVTDNGKGIAYDEVDKAFQRHATSKLLSPESLFRIKTLGFRGEALPSIASVSEVHIESAQEGHKGRALHLSGGEIISSQSASARSGTMIQVEDLFFNTPARLKHLKSMQTELTHITSTLNRFALTHPGVSFKLIHDGMTLMNTSGSGKLQQAIAGIYGVQIAKKMLKVEASNFNFDLTGYVSLPEVSRSNRSYMTIIVNDRYIKNYALARAIVQGYGSKLMVGRFPLAVIKIDMDPQLVDVNVHPTKDQVRISGEKDLADLITGAIRKILDQTVRIPDGLENINQNQIKVRDRQENAVQGRLDFNQSDNHAPYQENPKPSPTFSQASHESSQVGHLSDSFQPYQDQERKDLASSQQDQPTDSLGPGQGRGETQTILGHESGDFVKQAQDQLRKDGALEGEGLTQDQEGFPDLDYIGQMHGTYLFAQNEIGLYIIDQHAAQERIKYEYYREEIASSGTAQQTLLEPVVLDYPTDDYLTICQHKDDLSRAGIDLEDFGQRTFIVKSHPSWFINGQEEATIKEMIDFVLTHQHISTKEFREATAIMMSCKRSIKANHYLSDLEARALIQDLKSCQNPYNCPHGRPVMVKLTNRDMEKMFKRIQDR

SEQ ID NO: 5577 - DNA, 243 bp, Alloiococcus otitidis
  CDS (13)..(240)
atctttcctttcttggtcttggtagggttggaaggaatcggacaaatgaccaacttgactggattcatgacttgcctgactaaaagtcgggcttggttttggattttcctgatagggggcatgattgtcactttgattaaagtccaagcgaccctggacagcattttcctgtctatcccttactttgatctggttttggttaatattttccaagccatctggtatccggactgtttggtctag

SEQ ID NO: 5578 - protein, 76 aa, Alloiococcus otitidis
MVLVGLEGIGQMTNLTGFMTCLTKSRAWFWIFLIGGMIVTLIKVQATLDSIFLSIPYFDLVLVNIFQAIWYPDCLV

SEQ ID NO: 5579 - DNA, 2598 bp, Alloiococcus otitidis
  CDS (190)..(2595)
atggccaaaacagaacacacccccatgatgaaacaatacctatcgattaaggaggactatcctgattgttttttattctatcgtttgggggacttttacgaattattttttgaagatgccaaccgggtggcccaaatcttggaattaaccctaactagccggaataagaactcggatgtccaagtccccatgtgtggcgttccctaccattcagctcaaaggtacatcaataagttaattgatctgggctacaaggtagctatttgtgaacaggtggaggaccctaagacgactaagggcatggttaaacgggaagttgtccaggtggtcacacctggaactgtaatggaagaaagtgccatgggggacaagactaatacttatatcggggccattttagaccaagatgggcaatactccttagcctatgccgatttatcgactggagaaattcaggtcacttgcttagacgattaccaagaagtcatcaccgaagttggcgccttgcaaataaaagaactggtttttttgcaagggaaactagtgggattgcaggaagatttaaccaagcgtttcggtctagtcatctcccacctgtctgattttaaccaggaccaagaaagcaaagacctctacaaagccatccagcaccccttaaacaaaagttgtttaagtctattgctggactatctcagacagacccaaaaaaggagtttggaccaccttcaagtagcccaagaatatgagacttcccactacctaatatacggtcaagaagcaagacggaacttggagttgacccaatcgctcaaagatggcagtaagaaagggaccttgctttggcttttagacgaaagccagactgctatgggggggcggatgctcaagcattggctagataagcccttaattaacccccagcaaattgcaaaacgccaggacattgttgccaacttgctggaccactttattgaacgtagtgacttggaagaccgcttaagagaagtctatgacttggaacgcttagctggtcgagtggcttatggaacggttaatgccaaggacctggttcaattaaaagaatccctccaggttatcccccaagtgaaagacctcttgaccctgatggaagaccaagatgtttgggcagatttattagaccggctagacccggttccccaagtggctcaattgatccaagaagcaattgtggatgacccacccctttctatcacggagggtgatatgattaagtctggctacaatgaggaattggaccaatacttggacgccatggtaaatggcaagcagtggattgccaaacttcaagccaaggaaagagaaaaaacgggcattaagaacttgaaggtgggttataacaaggtctttggctactatattgaaattaccaaagccaacttagacctcctagaagacgaccgatacgaccgcaagcaaaccctggccaatgcagagcgttttgtgacccaggaactcaaagaaaaagaaaaactgattcttgaggctgaagacaagtctaaggccttgtcttatgagctttttcttgacatcagggagaaagtcaaggcccacatcaaggccatccaagacctagccaaggctgtggctgaaattgatgtcctccaagcctttgccaaggttagtgaaaaatataattacgtgagacctagttaccatactgaaagtcaaagtgtctcgattaaagaaggtcgtcaccccgttgtagagaaggtcatgcaagagcagcaatatgtgcccaatgatgttgatttgaatgatggccaagatatcttattgattactggacccaatatgtctggtaagagtacctatatgcgtcagttggcccttaccttgatcatgggtcaaatgggctgttatgtcccagctaagtcagctgacctccccattttcgacaaagtatttacccggattggggccatggatgatctcttcgggggtcaaagtacctttatggtggaaatgaacgaaaccaaccatgccctacaaaatgctagcagtcacagcttgctcttgtttgacgagatcggccgggggacggctacctatgacggcatggccctagctgaagccatcattgagtatgtacacgatgaaattggagccaagaccctcttttctacccactatcatgaactgaccgaactagaagaccgcctagaccgtttgacgaatgttcatgttggggccgaagaagaagagggatctctggttttcttccacaaggtcttgtctggaccatctgacaagagttatggggtccaggtagctcaactggcaggcctgccccagccggtaattgaccgggctggccaggtcctaaaccagctagaagcaggcaaaagcaagcaagtgactagccaaccagcagagtcagctgaagaccagtccaagtctgaggcccagcagttagacctctttgccccagaagaagagctttcgatgactaacaagcatgctgaggttatcaagcaattgcaagaggcccagattatgaatatgacccctatccaggcccttaattttctaaatgacctgaaccaaaagcttcattag

SEQ ID NO: 5580 - protein, 802 aa, Alloiococcus otitidis
MCGVPYHSAQRYINKLIDLGYKVAICEQVEDPKTTKGMVKREVVQVVTPGTVMEESAMGDKTNTYIGAILDQDGQYSLAYADLSTGEIQVTCLDDYQEVITEVGALQIKELVFLQGKLVGLQEDLTKRFGLVISHLSDFNQDQESKDLYKAIQHPLNKSCLSLLLDYLRQTQKRSLDHLQVAQEYETSHYLIYGQEARRNLELTQSLKDGSKKGTLLWLLDESQTAMGGRMLKHWLDKPLINPQQIAKRQDIVANLLDHFIERSDLEDRLREVYDLERLAGRVAYGTVNAKDLVQLKESLQVIPQVKDLLTLMEDQDVWADLLDRLDPVPQVAQLIQEAIVDDPPLSITEGDMIKSGYNEELDQYLDAMVNGKQWIAKLQAKEREKTGIKNLKVGYNKVFGYYIEITKANLDLLEDDRYDRKQTLANAERFVTQELKEKEKLILEAEDKSKALSYELFLDIREKVKAHIKAIQDLAKAVAEIDVLQAFAKVSEKYNYVRPSYHTESQSVSIKEGRHPVVEKVMQEQQYVPNDVDLNDGQDILLITGPNMSGKSTYMRQLALTLIMGQMGCYVPAKSADLPIFDKVFTRIGAMDDLFGGQSTFMVEMNETNHALQNASSHSLLLFDEIGRGTATYDGMALAEAIIEYVHDEIGAKTLFSTHYHELTELEDRLDRLTNVHVGAEEEEGSLVFFHKVLSGPSDKSYGVQVAQLAGLPQPVIDRAGQVLNQLEAGKSKQVTSQPAESAEDQSKSEAQQLDLFAPEEELSMTNKHAEVIKQLQEAQIMNMTPIQALNFLNDLNQKLH

SEQ ID NO: 5581 - DNA, 2598 bp, Alloiococcus otitidis; identical to SEQ ID NO: 5579
  CDS (1)..(2595)

SEQ ID NO: 5582 - protein, 865 aa, Alloiococcus otitidis
MAKTEHTPMMKQYLSIKEDYPDCFLFYRLGDFYELFFEDANRVAQILELTLTSRNKNSDVQVPMCGVPYHSAQRYINKLIDLGYKVAICEQVEDPKTTKGMVKREVVQVVTPGTVMEESAMGDKTNTYIGAILDQDGQYSLAYADLSTGEIQVTCLDDYQEVITEVGALQIKELVFLQGKLVGLQEDLTKRFGLVISHLSDFNQDQESKDLYKAIQHPLNKSCLSLLLDYLRQTQKRSLDHLQVAQEYETSHYLIYGQEARRNLELTQSLKDGSKKGTLLWLLDESQTAMGGRMLKHWLDKPLINPQQIAKRQDIVANLLDHFIERSDLEDRLREVYDLERLAGRVAYGTVNAKDLVQLKESLQVIPQVKDLLTLMEDQDVWADLLDRLDPVPQVAQLIQEAIVDDPPLSITEGDMIKSGYNEELDQYLDAMVNGKQWIAKLQAKEREKTGIKNLKVGYNKVFGYYIEITKANLDLLEDDRYDRKQTLANAERFVTQELKEKEKLILEAEDKSKALSYELFLDIREKVKAHIKAIQDLAKAVAEIDVLQAFAKVSEKYNYVRPSYHTESQSVSIKEGRHPVVEKVMQEQQYVPNDVDLNDGQDILLITGPNMSGKSTYMRQLALTLIMGQMGCYVPAKSADLPIFDKVFTRIGAMDDLFGGQSTFMVEMNETNHALQNASSHSLLLFDEIGRGTATYDGMALAEAIIEYVHDEIGAKTLFSTHYHELTELEDRLDRLTNVHVGAEEEEGSLVFFHKVLSGPSDKSYGVQVAQLAGLPQPVIDRAGQVLNQLEAGKSKQVTSQPAESAEDQSKSEAQQLDLFAPEEELSMTNKHAEVIKQLQEAQIMNMTPIQALNFLNDLNQKLH

SEQ ID NO: 5583 - DNA, 981 bp, Alloiococcus otitidis
  CDS (151)..(978)
tggcctattcgcttacaaacacaaaaaagattaaggtctttaagcaaatatccaaaagataagattagccatctagtagcaaaagtcttcaagaaatctacccaagtctcttgggtaggttttttgtttcgtgagccaaatcttggtaaaatgaagggtaagagagtgaaggtgtcagtcatgaaaattttatttatcggtgatatcgtcggacgtgtcggacgtcaggcggttaagcactacctgcccgccctaaaaaagaagcataaggtgaacttgaccatcgccaacggagagaatgcggctggtgggaaaggaattacccggcccatctttaaagaactgatgcaggtaggcattgatgtggtcaccatgggcaaccatacctgggacaagagggaagtctaccagtttatcgaccaagaggacaagatcatccgccccgctaattaccctaattccgaccaggttccgggtaaggggataacttatgtccaggtcaacgaccaagaattggctattatcaaccttcatggccgggccttaatgggtgacttggaagatccctttcgtgttggcttagacttagttgaccaagccaacaaacggacaccccatatttttgttgattttcatgctgagacaacaagtgaaaaagaagccatgggatggtttttggacggcaaggcatcagccctagtcggcacccacacccatgtccagaccaatgacaaccggattttgcccaatggaactgcttatgtgagcgatgtgggcatgacgggctttgctgatggcattttaggcatggaacgacaagccatcctcaataagtttttaacccaattgccggcccggatcaaagctccagaagtaggggaggcccgtctcaatgccagtttagtcaacatagataagttcggtcgggcagggtcgattgagatgatccggattgataaggaaaatcccttttatatttag

SEQ ID NO: 5584 - protein, 276 aa, Alloiococcus otitidis
MKGKRVKVSVMKILFIGDIVGRVGRQAVKHYLPALKKKHKVNLTIANGENAAGGKGITRPIFKELMQVGIDVVTMGNHTWDKREVYQFIDQEDKIIRPANYPNSDQVPGKGITYVQVNDQELAIINLHGRALMGDLEDPFRVGLDLVDQANKRTPHIFVDFHAETTSEKEAMGWFLDGKASALVGTHTHVQTNDNRILPNGTAYVSDVGMTGFADGILGMERQAILNKFLTQLPARIKAPEVGEARLNASLVNIDKFGRAGSIEMIRIDKENPFYI

SEQ ID NO: 5585 - DNA, 981 bp, Alloiococcus otitidis; identical to SEQ ID NO: 5583
  CDS (124)..(978)

SEQ ID NO: 5586 - protein, 285 aa, Alloiococcus otitidis
MFREPNLGKMKGKRVKVSVMKILFIGDIVGRVGRQAVKHYLPALKKKHKVNLTIANGENAAGGKGITRPIFKELMQVGIDVVTMGNHTWDKREVYQFIDQEDKIIRPANYPNSDQVPGKGITYVQVNDQELAIINLHGRALMGDLEDPFRVGLDLVDQANKRTPHIFVDFHAETTSEKEAMGWFLDGKASALVGTHTHVQTNDNRILPNGTAYVSDVGMTGFADGILGMERQAILNKFLTQLPARIKAPEVGEARLNASLVNIDKFGRAGSIEMIRIDKENPFYI

SEQ ID NO: 5587 - DNA, 1383 bp, Alloiococcus otitidis
  CDS (85)..(1380)
agcgaaagcaaatttatatacaaaggagtgttaattatggttggcaaaaacaaacttgcaagaggtctaggacaagaggctaaagtgaaacaccgctttacactgaaaaagcttagccttggtcttgtttctgttgcaattggttccagtttaattttaagtcatgttgaagcggtttcagcttcggaaaatgataaggttgaagtcagtttacaagaaagcaaagacaaagagccccaggaggcaggtagtaaagaacttgaagaaaagctatatagatttgaattccaaaacaagattactaagggatcgactaccgttaaggctaaaagtgctgaggaagcagaaaaatacttccgtaaatacgcaaacaatagtggcctaggcaatcttcactggtcatacaacgacaagaccctaacctttactgctaatagccaaaaaacagtcgaagacaatgaaactggctactccactaaagaagcagcggaaacagcagccaaaaaagcattagaaaaagataccgtcaacaagtcttacacagttaaacaaggggccaatggtcgctggttctaccttctctcaccaaacccagtagaagaaccaggcaaaccaggtgaggaaaaaccagccgaagataacgaaaatggctactccactaaagaagcagcggaagcagcagccaaaaaagcattagagaaagataccgtcaacaagtcttacacagttaaacaaggggcaaatggccgctggttctacctcctctcaccaaatccagtagaagagccaggaaagccaggcgaggaaaaaccagccgaagataacgaaaatggttactcttctaaagaagcagcagaagcagcagccaaaaaagcattagaaaaagataccgtcaacaagtcttacacagttaaacaaggggccaatggtcgttggttctacctcctctcaccaaacccagtagaagagccgggcaaaccaggtgagcaaaaaccaggcgaaaaaccaggtgaacaaaaaccaggtgaagaaaaaccaggtgagcaaaaaccgggcgaaaaaccaggtgagcaaaaaccgggtgaagaaaaaccaggcgagcaaaaaccgggcgagcaaaaaccaggtgagcaaaagccaggtgaagaaaaaccaggtgagcaaaagccgggtgaagaaaaaccaggcgataaaaaaccgactgaacaaaaaccagagttcaaaaacaaagcagtcaaaaaaccaggtaaagccgttcaagcaattagcaaaaaaccgggtcaacgactaccaaacaccgctacaggaacatgggctttaggattatttggtctgacaagcttggctagtggcctattcgcttacaaacacaaaaaagattaa

SEQ ID NO: 5588 - protein, 432 aa, Alloiococcus otitidis
MKHRFTLKKLSLGLVSVAIGSSLILSHVEAVSASENDKVEVSLQESKDKEPQEAGSKELEEKLYRFEFQNKITKGSTTVKAKSAEEAEKYFRKYANNSGLGNLHWSYNDKTLTFTANSQKTVEDNETGYSTKEAAETAAKKALEKDTVNKSYTVKQGANGRWFYLLSPNPVEEPGKPGEEKPAEDNENGYSTKEAAEAAAKKALEKDTVNKSYTVKQGANGRWFYLLSPNPVEEPGKPGEEKPAEDNENGYSSKEAAEAAAKKALEKDTVNKSYTVKQGANGRWFYLLSPNPVEEPGKPGEQKPGEKPGEQKPGEEKPGEQKPGEKPGEQKPGEEKPGEQKPGEQKPGEQKPGEEKPGEQKPGEEKPGDKKPTEQKPEFKNKAVKKPGKAVQAISKKPGQRLPNTATGTWALGLFGLTSLASGLFAYKHKKD

SEQ ID NO: 5589 - DNA, 1383 bp, Alloiococcus otitidis; identical to SEQ ID NO: 5587
  CDS (37)..(1380)

SEQ ID NO: 5590 - protein, 448 aa, Alloiococcus otitidis
MVGKNKLARGLGQEAKVKHRFTLKKLSLGLVSVAIGSSLILSHVEAVSASENDKVEVSLQESKDKEPQEAGSKELEEKLYRFEFQNKITKGSTTVKAKSAEEAEKYFRKYANNSGLGNLHWSYNDKTLTFTANSQKTVEDNETGYSTKEAAETAAKKALEKDTVNKSYTVKQGANGRWFYLLSPNPVEEPGKPGEEKPAEDNENGYSTKEAAEAAAKKALEKDTVNKSYTVKQGANGRWFYLLSPNPVEEPGKPGEEKPAEDNENGYSSKEAAEAAAKKALEKDTVNKSYTVKQGANGRWFYLLSPNPVEEPGKPGEQKPGEKPGEQKPGEEKPGEQKPGEKPGEQKPGEEKPGEQKPGEQKPGEQKPGEEKPGEQKPGEEKPGDKKPTEQKPEFKNKAVKKPGKAVQAISKKPGQRLPNTATGTWALGLFGLTSLASGLFAYKHKKD

SEQ ID NO: 5591 - DNA, 1383 bp, Alloiococcus otitidis; identical to SEQ ID NO: 5587
  CDS (28)..(1380)

SEQ ID NO: 5592 - protein, 451 aa, Alloiococcus otitidis
MLIMVGKNKLARGLGQEAKVKHRFTLKKLSLGLVSVAIGSSLILSHVEAVSASENDKVEVSLQESKDKEPQEAGSKELEEKLYRFEFQNKITKGSTTVKAKSAEEAEKYFRKYANNSGLGNLHWSYNDKTLTFTANSQKTVEDNETGYSTKEAAETAAKKALEKDTVNKSYTVKQGANGRWFYLLSPNPVEEPGKPGEEKPAEDNENGYSTKEAAEAAAKKALEKDTVNKSYTVKQGANGRWFYLLSPNPVEEPGKPGEEKPAEDNENGYSSKEAAEAAAKKALEKDTVNKSYTVKQGANGRWFYLLSPNPVEEPGKPGEQKPGEKPGEQKPGEEKPGEQKPGEKPGEQKPGEEKPGEQKPGEQKPGEQKPGEEKPGEQKPGEEKPGDKKPTEQKPEFKNKAVKKPGKAVQAISKKPGQRLPNTATGTWALGLFGLTSLASGLFAYKHKKD

SEQ ID NO: 5593 - DNA, 318 bp, Alloiococcus otitidis
  CDS (19)..(315)
acggctttacctggttttttgactgctttgtttttgaactctggtttttgttcagtcggttttttatcgcctggtttttcttcacccggcttttgctcacctggtttttcttcacctggcttttgctcacctggtttttgctcgcccggtttttgctcgcctggtttttcttcacccggtttttgctcacctggtttttcgcccggtttttgctcacctggtttttcttcacctggtttttgttcacctggtttttcgcctggtttttgctcacctggtttgcccggctcttctactgggtttggtgagaggaggtag

SEQ ID NO: 5594 - protein, 99 aa, Alloiococcus otitidis
MTALFLNSGFCSVGFLSPGFSSPGFCSPGFSSPGFCSPGFCSPGFCSPGFSSPGFCSPGFSPGFCSPGFSSPGFCSPGFSPGFCSPGLPGSSTGFGERR

SEQ ID NO: 5595 - DNA, 231 bp, Alloiococcus otitidis
  CDS (4)..(228)
agattgcctaggccactattgtttgcgtatttacggaagtatttttctgcttcctcagcacttttagccttaacggtagtcgatcccttagtaatcttgttttggaattcaaatctatatagcttttcttcaagttctttactacctgcctcctggggctctttgtctttgctttcttgtaaactgacttcaaccttatcattttccgaagctgaaaccgcttcaacatga

SEQ ID NO: 5596 - protein, 75 aa, Alloiococcus otitidis
MPRPLLFAYLRKYFSASSALLALTVVDPLVILFWNSNLYSFSSSSLLPASWGSLSLLSCKLTSTLSFSEAETAST

SEQ ID NO: 5597 - DNA, 1551 bp, Alloiococcus otitidis
  CDS (997)..(1548)
gtttataatgaagctaaagtaataactttaggaggaaagaacatgctaacctttattggcggtatcttactattagtcctgggctattttacatatggaaagtttgtggatcgaaatttccaaattgaaccgggcaggtccacgccagctgaggtcttgcgggataatatggactttgtccctatgaaaaagcagaccaatgccttgattgaacttcttaacattgcagggaccggccctatttttggacctattatgggggccttgtatggaccaatggcctatgtctggattgttttgggctgtatctttgctggtggtgtgcatgactacatgattgggatgatttccctccgtaacaatggggcccacctaccagaactagctgagaagtatttaggcagaccggttaaacatgtggtcaacatctttgccatgctcctgttaattttggtttccacagtttttgtggtcacaccagccgaactgattgctgatttgaccccagcagggataacagttggtttgattaccctcctgatttttgcttactacttggtatcgaccgttattccaatagataaggctatggggaaagtctatcccatattcggggcagttttaattttaactaccctggcaattggtggcatgctaatctaccatggctttgccggtacttacaccttgcctaatttaagcttggccaacttgaccaacaaccctcacccagacgggacaccagtctttccaattatcttctttactatttcatgcggggccttgtcaggctttcatgctactcaggcgcccatggtctcccggaccacaaccaatgagagagaaggccggtatactttttatggtatgatgatcgctgaaggtgttattgccatgatttgggctactgcagctatggccttgtttgacggtcaaagtctcgcagatatgattgcagccggtactccttctgtagttgttaatgaagtttccttcttgttgctgggcaatgtctttggtaccttggccatcttgggtgtcattgtcctccctatttcttctggcttgtcaggctttagaagtttgcgaaatatcctggcagattatatcggcatgaaacaagactccttgcgtaaagtcatggcggttacgatccctctctttgtcgtttcttttatcttgaccacgatagactttgatatcttgtggcgctactttagttgggctaaccaagtcacagccgttatttccctctttgtttctacccgttatctctacctcaaggggcgcaactacttgatcactttcttgccaggtgcctttatgctctatgcgactgtaatttacatcctagctcaaccgattggctttaaccttggttatggtcttttgtcctacctcttagccctcgtcttgtctctagccatcgtttacctattctggtcaactggttataaactcaaacaaaatttaaatccggatagtttgctgattaatgaccaacttccgatcaaggaaatccaacgcagaaaattagcacaaagttcttag

SEQ ID NO: 5598 - protein, 184 aa, Alloiococcus otitidis
MLLGNVFGTLAILGVIVLPISSGLSGFRSLRNILADYIGMKQDSLRKVMAVTIPLFVVSFILTTIDFDILWRYFSWANQVTAVISLFVSTRYLYLKGRNYLITFLPGAFMLYATVIYILAQPIGFNLGYGLLSYLLALVLSLAIVYLFWSTGYKLKQNLNPDSLLINDQLPIKEIQRRKLAQSS

SEQ ID NO: 5599 - DNA, 1551 bp, Alloiococcus otitidis; identical to SEQ ID NO: 5597
  CDS (43)..(1548)

SEQ ID NO: 5600 - protein, 502 aa, Alloiococcus otitidis
MLTFIGGILLLVLGYFTYGKFVDRNFQIEPGRSTPAEVLRDNMDFVPMKKQTNALIELLNIAGTGPIFGPIMGALYGPMAYVWIVLGCIFAGGVHDYMIGMISLRNNGAHLPELAEKYLGRPVKHVVNIFAMLLLILVSTVFVVTPAELIADLTPAGITVGLITLLIFAYYLVSTVIPIDKAMGKVYPIFGAVLILTTLAIGGMLIYHGFAGTYTLPNLSLANLTNNPHPDGTPVFPIIFFTISCGALSGFHATQAPMVSRTTTNEREGRYTFYGMMIAEGVIAMIWATAAMALFDGQSLADMIAAGTPSVVVNEVSFLLLGNVFGTLAILGVIVLPISSGLSGFRSLRNILADYIGMKQDSLRKVMAVTIPLFVVSFILTTIDFDILWRYFSWANQVTAVISLFVSTRYLYLKGRNYLITFLPGAFMLYATVIYILAQPIGFNLGYGLLSYLLALVLSLAIVYLFWSTGYKLKQNLNPDSLLINDQLPIKEIQRRKLAQSS

SEQ ID NO: 5601 - DNA, 762 bp, Alloiococcus otitidis
  CDS (19)..(759)
gagggaggagtaagccatatgcacctattgattgttgatgatgaacccctagcccgtgacgaactgacctatttaatccatcaaatttcaaaagatatccaagtgagccaggctgagactggtcaagaagcccttgacattatttcagacgaggaggttgaggttgatggggttttcttggatatccagttgtcagtcgaaaatggcatgtccatcgccgatgatattaatgccttaccgaatcctcctgctatcatttttgctacagcctatgatgcttatgcggttgcggcctttgagcgggatgccctagattatgtcttgaagccctttagcttagaccggatccagcactccattaacaagttgtctagccaggtggaacagaagctcaaggttaaaaggccaatctccaagaaagaaactggtcggaccaaacgctttcctttagagacaggggacaaattggtgatcgtcgacagcgaagatatcctggcagtggaagtcttgaaagggcagaccactctctatacccggggtggcaagtattatgaccggcagtctttagttaaatgggaagaaaaattaagccaagaatcctttatccgggtccaccggtcttacttgatccagctggatgccattaaggaggtccaggcttggtttaaccaaacctaccaagttactcttgaaaatgggatgaaaatacctgtttctcggtcttatctccaagacttcaaggaagctttgggcttaaactaa

SEQ ID NO: 5602 - protein, 247 aa, Alloiococcus otitidis
MHLLIVDDEPLARDELTYLIHQISKDIQVSQAETGQEALDIISDEEVEVDGVFLDIQLSVENGMSIADDINALPNPPAIIFATAYDAYAVAAFERDALDYVLKPFSLDRIQHSINKLSSQVEQKLKVKRPISKKETGRTKRFPLETGDKLVIVDSEDILAVEVLKGQTTLYTRGGKYYDRQSLVKWEEKLSQESFIRVHRSYLIQLDAIKEVQAWFNQTYQVTLENGMKIPVSRSYLQDFKEALGLN

SEQ ID NO: 5603 - DNA, 1179 bp, Alloiococcus otitidis
  CDS (175)..(1176)
ttaatagcttggggcatggggattttcttagcctttatccggtcaagccaagagcgacaggttatggaccgggctgtccagacccaggatgtcttggctttggccaatgccaccctgcctcatttccggcaaggtttggccattgagtcttgcagcaaggcagcccaagaaatcatgaattacatcaagttagctgctgttagcattaccgacaaggagaaaatcctagcccatgttggcttggctgatgaccaccacaagcctggcaaccccatcatgactcgtctgtccaagcaggtgctcgaaggcaaggaagtcgtcatcgcccggtctaagtcagagattgcctgtggccatcccaactgcccactccaagcagctattgtcgtccccttaaagaccaaggaaggggtggtcgggaccttgaaattatactttgagtctagccaggatttgacctttgtggagaaaaaagtggcagaaggtctaggtaatatcttctcttcccagattgacctgggcaagagtgaactccaggctagactcttgcaagatgctgagattaagtccttgcaagcccaagtcaacccccattttttctttaatgccattaataccatctcggccatggttaggctggatagtgaaaaggcccggcaacttttgagtcagttaagcgatttcttccgggccaacttggtaggagcacggtctaacctggtcactttaggccaggagttagaccatgtcaaggcttaccaatctttagaacaagcccgctttcctggtcgctaccagctagactttcaggtagacgaggggcttttacctgtcttagtcccaccctttatcctacaagtcttggttgagaacgcttttaaacatgcttttaaggggaggaaagcaggcaatgaaattaaactagaagttaaggaagaagttgacgatatcctgatcactgtccaagataatgggttcggaatggagccgtccattttaaaggatttgggccagaaagaggtcaagtcgagtcagagtaaagggactgggaccgctttgctgaatttaaacaagcgcttgaccaacctttttggtctcgacagtcagctcaaagttgactcgtcagaaaccggaaccactgttagctgtcacttgcccaagactaggagggaggagtaa

SEQ ID NO: 5604 - protein, 334 aa, Alloiococcus otitidis
MNYIKLAAVSITDKEKILAHVGLADDHHKPGNPIMTRLSKQVLEGKEVVIARSKSEIACGHPNCPLQAAIVVPLKTKEGVVGTLKLYFESSQDLTFVEKKVAEGLGNIFSSQIDLGKSELQARLLQDAEIKSLQAQVNPHFFFNAINTISAMVRLDSEKARQLLSQLSDFFRANLVGARSNLVTLGQELDHVKAYQSLEQARFPGRYQLDFQVDEGLLPVLVPPFILQVLVENAFKHAFKGRKAGNEIKLEVKEEVDDILITVQDNGFGMEPSILKDLGQKEVKSSQSKGTGTALLNLNKRLTNLFGLDSQLKVDSSETGTTVSCHLPKTRREE

SEQ ID NO: 5605 - DNA, 1179 bp, Alloiococcus otitidis; identical to SEQ ID NO: 5603
  CDS (94)..(1176)

SEQ ID NO: 5606 - protein, 361 aa, Alloiococcus otitidis
MALANATLPHFRQGLAIESCSKAAQEIMNYIKLAAVSITDKEKILAHVGLADDHHKPGNPIMTRLSKQVLEGKEVVIARSKSEIACGHPNCPLQAAIVVPLKTKEGVVGTLKLYFESSQDLTFVEKKVAEGLGNIFSSQIDLGKSELQARLLQDAEIKSLQAQVNPHFFFNAINTISAMVRLDSEKARQLLSQLSDFFRANLVGARSNLVTLGQELDHVKAYQSLEQARFPGRYQLDFQVDEGLLPVLVPPFILQVLVENAFKHAFKGRKAGNEIKLEVKEEVDDILITVQDNGFGMEPSILKDLGQKEVKSSQSKGTGTALLNLNKRLTNLFGLDSQLKVDSSETGTTVSCHLPKTRREE

SEQ ID NO: 5607 - DNA, 1179 bp, Alloiococcus otitidis; identical to SEQ ID NO: 5603
  CDS (16)..(1176)

SEQ ID NO: 5608 - protein, 387 aa, Alloiococcus otitidis
MGIFLAFIRSSQERQVMDRAVQTQDVLALANATLPHFRQGLAIESCSKAAQEIMNYIKLAAVSITDKEKILAHVGLADDHHKPGNPIMTRLSKQVLEGKEVVIARSKSEIACGHPNCPLQAAIVVPLKTKEGVVGTLKLYFESSQDLTFVEKKVAEGLGNIFSSQIDLGKSELQARLLQDAEIKSLQAQVNPHFFFNAINTISAMVRLDSEKARQLLSQLSDFFRANLVGARSNLVTLGQELDHVKAYQSLEQARFPGRYQLDFQVDEGLLPVLVPPFILQVLVENAFKHAFKGRKAGNEIKLEVKEEVDDILITVQDNGFGMEPSILKDLGQKEVKSSQSKGTGTALLNLNKRLTNLFGLDSQLKVDSSETGTTVSCHLPKTRREE

SEQ ID NO: 5609 - DNA, 732 bp, Alloiococcus otitidis
  CDS (253)..(729)
gtggctgacatggtcgatttattcatcatgatggtagaacgtttgggcttgatcattttaatggcttacatcttggtccagacccgcttgtttaaaagggtcttttatcgccggagagacctgtctacccaattgattttggtggctatttttgcggtttttgccctaatgtctaacctcaatggggtggaagtacaagccggatcggtggtttaccgtcccattttaaccaaactagcaccggcttcttccatggctaacaccagagccttgactattgggatctcaggcatcattggtggccccttggtgggagtttcagtgggaggtatttccggtattgtccgctacttccaagggggcttggacccacatgtctacctcatctcttctctattgattggtctggtatcaggtctgctgggccaggtctatatccagaagcggcagatacctaccgttctattcggtggcctggttgcaggagcttttgagctggttcaaatggcagttatcttaattgccagctcaaggctagaccaggctttagtcttggtccagtttatcattttgccgatgacaatgattaatagcttggggcatggggattttcttagcctttatccggtcaagccaagagcgacaggttatggaccgggctgtccagacccaggatgtcttggctttggccaatgccaccctgcctcatttccggcaaggtttggccattga

SEQ ID NO: 5610 - protein, 159 aa, Alloiococcus otitidis
MANTRALTIGISGIIGGPLVGVSVGGISGIVRYFQGGLDPHVYLISSLLIGLVSGLLGQVYIQKRQIPTVLFGGLVAGAFELVQMAVILIASSRLDQALVLVQFIILPMTMINSLGHGDFLSLYPVKPRATGYGPGCPDPGCLGFGQCHPASFPARFGH

SEQ ID NO: 5611 - DNA, 732 bp, Alloiococcus otitidis; identical to SEQ ID NO: 5609
  CDS (73)..(729)

SEQ ID NO: 5612 - protein, 219 aa, Alloiococcus otitidis
MVQTRLFKRVFYRRRDLSTQLILVAIFAVFALMSNLNGVEVQAGSVVYRPILTKLAPASSMANTRALTIGISGIIGGPLVGVSVGGISGIVRYFQGGLDPHVYLISSLLIGLVSGLLGQVYIQKRQIPTVLFGGLVAGAFELVQMAVILIASSRLDQALVLVQFIILPMTMINSLGHGDFLSLYPVKPRATGYGPGCPDPGCLGFGQCHPASFPARFGH

SEQ ID NO: 5613 - DNA, 732 bp, Alloiococcus otitidis; identical to SEQ ID NO: 5609
  CDS (10)..(729)

SEQ ID NO: 5614 - protein, 240 aa, Alloiococcus otitidis
MVDLFIMMVERLGLIILMAYILVQTRLFKRVFYRRRDLSTQLILVAIFAVFALMSNLNGVEVQAGSVVYRPILTKLAPASSMANTRALTIGISGIIGGPLVGVSVGGISGIVRYFQGGLDPHVYLISSLLIGLVSGLLGQVYIQKRQIPTVLFGGLVAGAFELVQMAVILIASSRLDQALVLVQFIILPMTMINSLGHGDFLSLYPVKPRATGYGPGCPDPGCLGFGQCHPASFPARFGH

SEQ ID NO: 5615 - DNA, 732 bp, Alloiococcus otitidis; identical to SEQ ID NO: 5609
  CDS (1)..(729)

SEQ ID NO: 5616 - protein, 243 aa, Alloiococcus otitidis
MADMVDLFIMMVERLGLIILMAYILVQTRLFKRVFYRRRDLSTQLILVAIFAVFALMSNLNGVEVQAGSVVYRPILTKLAPASSMANTRALTIGISGIIGGPLVGVSVGGISGIVRYFQGGLDPHVYLISSLLIGLVSGLLGQVYIQKRQIPTVLFGGLVAGAFELVQMAVILIASSRLDQALVLVQFIILPMTMINSLGHGDFLSLYPVKPRATGYGPGCPDPGCLGFGQCHPASFPARFGH

SEQ ID NO: 5617 - DNA, 1560 bp, Alloiococcus otitidis
  CDS (508)..(1557)
gtgaactacctaacatttgccttcgctatcgttgctttaattatcggtttaggtcttggtgctttcttagcgcaaaagaacagtgataaaaaactttctgaagctcaccaaacagctaatgacattattgaagaagccaatcgtgaagctaaatcagtaagaaaagaagcgttgctggaggctaaagaagagatacaaaagtaccggtcagacgttgaagaagagttaaaagagagacgggctgaaatttctaaatctgaaaatcgactagaccaaagagaagataatttagaaagacggtctttatccttggacgataaagaaatttcactccaggaccgggaaacacgtgtcagtcaagaaaaagaagaaatagattcacttaaagaagaagcacaagcattagtatctaaacaagaagcaaaattacatgagcttgcagcccttagcccagaagaagccaaggaccaggtcttgagccaaaccgaagctgagttgactcgggaaatggccgttatggtcaaacaatatgaggataaggctaaatcagaagctaaccgaagagctaagaccatcgtaacagaagctatccagcggtgtgcagctgaccaagttgctgaaaacactgtcagtgtgattaacctaccaaatgacgacatgaagggccggattatcggtcgagaaggccggaacatccggacgattgaaagtctaaccggtatggacttgatcattgatgatacaccggaagctgtcgttttaagtggttatgacccaattagacgagaaattgccaagatggcccttgaaaaattgattgcagatggccggatccatcctggtcggatcgaagaagcagttgagaaagcccgcaaggatatggatgaacgaattagagaaattggagaggaaaccatgtttgaacttggaatccactccatccaccctgatttgatgaaaattgtcggccgactccacttccgcacctcttatggccaaaatgtactgcaacactcgattgaagtagccaaacttgccggtattttagctggtaaattaggtgaagatgtccagttagcgaaaagagctggcttattacatgatattggaaaagccttagatgccgaagtagacggtacccacgttgaagtcggtgcccaagttgctatgaaatacaatgaacaggatgtcgtggtcaataccatcgcttcccaccatggggatgtcgaagctagttcagtgattgcttctctggttgaagcagctgacaccatttcggcagcccgaccaggagcaagaagtgaatcctttgaaaactacattcaacgcttggaagaccttgaagccattgccaaatcattcgacggggtaaaagaaagttatgccattcaagcaggacgagaacttagaattattgttaagcctgaccaagtcgatgatacggaagcggctaatctttcaagaaatgttcgtaagaaaattgaagataccatggattacccaggccatattaaagtaacggtaatacgcgaaacacggtcaatagattatgccaaataa

SEQ ID NO: 5618 - protein, 350 aa, Alloiococcus otitidis
MAVMVKQYEDKAKSEANRRAKTIVTEAIQRCAADQVAENTVSVINLPNDDMKGRIIGREGRNIRTIESLTGMDLIIDDTPEAVVLSGYDPIRREIAKMALEKLIADGRIHPGRIEEAVEKARKDMDERIREIGEETMFELGIHSIHPDLMKIVGRLHFRTSYGQNVLQHSIEVAKLAGILAGKLGEDVQLAKRAGLLHDIGKALDAEVDGTHVEVGAQVAMKYNEQDVVVNTIASHHGDVEASSVIASLVEAADTISAARPGARSESFENYIQRLEDLEAIAKSFDGVKESYAIQAGRELRIIVKPDQVDDTEAANLSRNVRKKIEDTMDYPGHIKVTVIRETRSIDYAK

SEQ ID NO: 5619 - DNA, 1560 bp, Alloiococcus otitidis; identical to SEQ ID NO: 5617
  CDS (172)..(1557)

SEQ ID NO: 5620 - protein, 462 aa, Alloiococcus otitidis
MLEAKEEIQKYRSDVEEELKERRAEISKSENRLDQREDNLERRSLSLDDKEISLQDRETRVSQEKEEIDSLKEEAQALVSKQEAKLHELAALSPEEAKDQVLSQTEAELTREMAVMVKQYEDKAKSEANRRAKTIVTEAIQRCAADQVAENTVSVINLPNDDMKGRIIGREGRNIRTIESLTGMDLIIDDTPEAVVLSGYDPIRREIAKMALEKLIADGRIHPGRIEEAVEKARKDMDERIREIGEETMFELGIHSIHPDLMKIVGRLHFRTSYGQNVLQHSIEVAKLAGILAGKLGEDVQLAKRAGLLHDIGKALDAEVDGTHVEVGAQVAMKYNEQDVVVNTIASHHGDVEASSVIASLVEAADTISAARPGARSESFENYIQRLEDLEAIAKSFDGVKESYAIQAGRELRIIVKPDQVDDTEAANLSRNVRKKIEDTMDYPGHIKVTVIRETRSIDYAK

SEQ ID NO: 5621 - DNA, 1560 bp, Alloiococcus otitidis; identical to SEQ ID NO: 5617
  CDS (1)..(1557)

SEQ ID NO: 5622 - protein, 519 aa, Alloiococcus otitidis
MNYLTFAFAIVALIIGLGLGAFLAQKNSDKKLSEAHQTANDIIEEANREAKSVRKEALLEAKEEIQKYRSDVEEELKERRAEISKSENRLDQREDNLERRSLSLDDKEISLQDRETRVSQEKEEIDSLKEEAQALVSKQEAKLHELAALSPEEAKDQVLSQTEAELTREMAVMVKQYEDKAKSEANRRAKTIVTEAIQRCAADQVAENTVSVINLPNDDMKGRIIGREGRNIRTIESLTGMDLIIDDTPEAVVLSGYDPIRREIAKMALEKLIADGRIHPGRIEEAVEKARKDMDERIREIGEETMFELGIHSIHPDLMKIVGRLHFRTSYGQNVLQHSIEVAKLAGILAGKLGEDVQLAKRAGLLHDIGKALDAEVDGTHVEVGAQVAMKYNEQDVVVNTIASHHGDVEASSVIASLVEAADTISAARPGARSESFENYIQRLEDLEAIAKSFDGVKESYAIQAGRELRIIVKPDQVDDTEAANLSRNVRKKIEDTMDYPGHIKVTVIRETRSIDYAK

SEQ ID NO: 5623 - DNA, 411 bp, Alloiococcus otitidis
  CDS (73)..(408)
ccacttaaaacgacagcttccggtgtatcatcaatgatcaagtccataccggttagactttcaatcgtccggatgttccggccttctcgaccgataatccggcccttcatgtcgtcatttggtaggttaatcacactgacagtgttttcagcaacttggtcagctgcacaccgctggatagcttctgttacgatggtcttagctcttcggttagcttctgatttagccttatcctcatattgtttgaccataacggccatttcccgagtcaactcagcttcggtttggctcaagacctggtccttggcttcttctgggctaagggctgcaagctcatgtaattttgcttcttgtttagatactaatgcttgtgcttcttctttaagtgaatctatttcttctttttcttga

SEQ ID NO: 5624 - protein, 112 aa, Alloiococcus otitidis
MFRPSRPIIRPFMSSFGRLITLTVFSATWSAAHRWIASVTMVLALRLASDLALSSYCLTITAISRVNSASVWLKTWSLASSGLRAASSCNFASCLDTNACASSLSESISSFS

SEQ ID NO: 5625 - DNA, 411 bp, Alloiococcus otitidis; identical to SEQ ID NO: 5623
  CDS (34)..(408)

SEQ ID NO: 5626 - protein, 125 aa, Alloiococcus otitidis
MIKSIPVRLSIVRMFRPSRPIIRPFMSSFGRLITLTVFSATWSAAHRWIASVTMVLALRLASDLALSSYCLTITAISRVNSASVWLKTWSLASSGLRAASSCNFASCLDTNACASSLSESISSFS

SEQ ID NO: 5627 - DNA, 1116 bp, Alloiococcus otitidis
  CDS (46)..(1113)
attaaaataaaccatgaaataagtatcagtttggaggattgcagaatggtatcggatgaaaaacaaaaagcactagaccaagcaatgaaaaaaatagaaaaaaacttcggtaaaggatccattatgaaaatgggagaacaagccgacacccaggttaagtcagtgccaagtggctctcttggcttagatgttgccttgggaattgggggctaccctagaggccggattgttgaagtatatggcccagaaagttcaggtaaaacaacagttgccctccatgccatcgcagccgttcaggcagaaggagggactgctgcctttatcgatgctgaacacgccctagaccctaaatatgcaagggcattaggtgttgatatagatgagctcttgctgtcacagccggataccggggaacaggccttggagattgcagatgccctggtttcttctggagccatcgacatgatagtagtcgactcggttgctgccttggtgccacgagcagaaattgacggggagatgggggactcccatgtcggcctccaagcccgtcttatgtctcaagcccttcgtaagttatcggggtcaattaacaaaaccaaaaccattgccatgtttattaaccaaatccgggaaaaagttggtgttatgtttggtaaccctgaaacaaccccaggtggccgagcccttaagttctactcttctgtacgcttagaagttcgccgcagcgaatccattaaagatggtaaagacctaaccgggaatcgtaccaagatcaaggtagttaaaaataaggtagcgccacccttcaaggtcgccattgtggacattatgtatggtaagggtatttcccaagtgggtgaaattgttgatatgggagcagaagtcgatattatcgacaaggcaggtgcctggtattcttacgacggtgaacgtctaggccaaggacgggaaaatgccaaagaattcttagaagaaaacccagacatccgaaaagaaattgaagccaaggtccgtcaagcctacgggattgaagatgatcaagaccatggagaaaatggcgaggaaacaggttcagaggatgtctctgaagaaagcacagccttagacctataa

SEQ ID NO: 5628 - protein, 356 aa, Alloiococcus otitidis
MVSDEKQKALDQAMKKIEKNFGKGSIMKMGEQADTQVKSVPSGSLGLDVALGIGGYPRGRIVEVYGPESSGKTTVALHAIAAVQAEGGTAAFIDAEHALDPKYARALGVDIDELLLSQPDTGEQALEIADALVSSGAIDMIVVDSVAALVPRAEIDGEMGDSHVGLQARLMSQALRKLSGSINKTKTIAMFINQIREKVGVMFGNPETTPGGRALKFYSSVRLEVRRSESIKDGKDLTGNRTKIKVVKNKVAPPFKVAIVDIMYGKGISQVGEIVDMGAEVDIIDKAGAWYSYDGERLGQGRENAKEFLEENPDIRKEIEAKVRQAYGIEDDQDHGENGEETGSEDVSEESTALDL

SEQ ID NO: 5629 - DNA, 1116 bp, Alloiococcus otitidis; identical to SEQ ID NO: 5627
  CDS (31)..(1113)

SEQ ID NO: 5630 - protein, 361 aa, Alloiococcus otitidis
MEDCRMVSDEKQKALDQAMKKIEKNFGKGSIMKMGEQADTQVKSVPSGSLGLDVALGIGGYPRGRIVEVYGPESSGKTTVALHAIAAVQAEGGTAAFIDAEHALDPKYARALGVDIDELLLSQPDTGEQALEIADALVSSGAIDMIVVDSVAALVPRAEIDGEMGDSHVGLQARLMSQALRKLSGSINKTKTIAMFINQIREKVGVMFGNPETTPGGRALKFYSSVRLEVRRSESIKDGKDLTGNRTKIKVVKNKVAPPFKVAIVDIMYGKGISQVGEIVDMGAEVDIIDKAGAWYSYDGERLGQGRENAKEFLEENPDIRKEIEAKVRQAYGIEDDQDHGENGEETGSEDVSEESTALDL

SEQ ID NO: 5631 - DNA, 1212 bp, Alloiococcus otitidis
  CDS (13)..(1209)
gaggtcgaatggatgaaagctgaaatcatagccattggaacagaagtcttgatggggcaggtggtcaataccaatgcagcctttatttcccaaagcttgtctgaacttggcattgatctttattaccatactgttgtgggggacaacccggaccggatcaaaaaagtttttcaaattgccttggaccggtcagacttgattattttctcaggggggttggggcccaccaaagatgatatttccaagtctattgtcgctgataccttaggtttagaggtatgggaagaccaggaaacactagctgaaattaaagaaatctaccaaaggtccaaccggcctatgccagctagtaatgtcaaccaagccttgataattgaaaacagccagaagattccaaatgaggtggggatggcaccgggatccttcttgaaacaccaaggcaaaatcattgccatggttccaggtgtcccagctgaaatgaagcagatggtcacttatcacttgttagacctcttgcaaaatgaactggatgacaaggctgttttggaatctaaaatcctccgcctctataatattacggagtcccaactagcccaatccatcgacccggtaatcgaaggccagactaatccgaccatagctatctacattacggattccgagcccaccattcggatttcagccaaggcggatagctcagcccatgcccaaaccttgatccaggaagtggaagaccagatcagggacttagtcggggacaaaatttacggggagggggctaccaccatcaccgacaaggtcttgtcgctcttggaccaggaaggtatccggctcaatattattgaaagtggtgtccacagtattctctcttctgccttgctggcccccaaagcacctcatggcctggtggagtcggtcttgagttttaatgacaacgctaagctaggcaagtacttcggccattcagaactaagttcagaccaactacagtcactagtgcaagaccaggctacagctttagcaggcaacggagccttactggttttgggcagggctggtgaagccaacaagttgctcaagcaagtctctctctactttgccgttcaaggtcagactcaccactttgacctagacttatctaaccgcaagactgtctctgacaaacaaatccaagttgccctaatgaccaagctttatgacctgatcaaataa

SEQ ID NO: 5632 - protein, 399 aa, Alloiococcus otitidis
MKAEIIAIGTEVLMGQVVNTNAAFISQSLSELGIDLYYHTVVGDNPDRIKKVFQIALDRSDLIIFSGGLGPTKDDISKSIVADTLGLEVWEDQETLAEIKEIYQRSNRPMPASNVNQALIIENSQKIPNEVGMAPGSFLKHQGKIIAMVPGVPAEMKQMVTYHLLDLLQNELDDKAVLESKILRLYNITESQLAQSIDPVIEGQTNPTIAIYITDSEPTIRISAKADSSAHAQTLIQEVEDQIRDLVGDKIYGEGATTITDKVLSLLDQEGIRLNIIESGVHSILSSALLAPKAPHGLVESVLSFNDNAKLGKYFGHSELSSDQLQSLVQDQATALAGNGALLVLGRAGEANKLLKQVSLYFAVQGQTHHFDLDLSNRKTVSDKQIQVALMTKLYDLIK

SEQ ID NO: 5633 - DNA, 582 bp, Alloiococcus otitidis
  CDS (235)..(579)
atgaacttaccaaataaactgactgtctttcgcatcctaatgattccggtctttatggtcttagccttagttccttttgacctaggctctatccaaggctgggggtcccaagttgatagccggatgtttttggccatgttggtttttgctgtggctagtttgaccgactacctggacggctacttggcccggaagaacaacttaaccactaactttggtaaatttgccgatcccttggctgacaagatgttggttatgacagcttttattatcttagttgaacttggcatggccccagcctgggtggttgctattattgtctgccgggagctggctgttacgggtcttcgcttgattttggtcgagcagggcgggactgttttagcggcagccttgccaggaaagattaagacagtgacccaaatgtttgccatcatctttttattgattgacaacttccccttgcaagcaatatccctccccttgggccaaatcttactttacacctgcctcttctttaccatatactccggtattgactacttctggaatgccagacatatctttaaggggtccatgtaa

SEQ ID NO: 5634 - protein, 115 aa, Alloiococcus otitidis
MADKMLVMTAFIILVELGMAPAWVVAIIVCRELAVTGLRLILVEQGGTVLAAALPGKIKTVTQMFAIIFLLIDNFPLQAISLPLGQILLYTCLFFTIYSGIDYFWNARHIFKGSM

SEQ ID NO: 5635 - DNA, 582 bp, Alloiococcus otitidis; identical to SEQ ID NO: 5633
  CDS (40)..(579)

SEQ ID NO: 5636 - protein, 180 aa, Alloiococcus otitidis
MIPVFMVLALVPFDLGSIQGWGSQVDSRMFLAMLVFAVASLTDYLDGYLARKNNLTTNFGKFADPLADKMLVMTAFIILVELGMAPAWVVAIIVCRELAVTGLRLILVEQGGTVLAAALPGKIKTVTQMFAIIFLLIDNFPLQAISLPLGQILLYTCLFFTIYSGIDYFWNARHIFKGSM

SEQ ID NO: 5637 - DNA, 582 bp, Alloiococcus otitidis; identical to SEQ ID NO: 5633
  CDS (1)..(579)

SEQ ID NO: 5638 - protein, 193 aa, Alloiococcus otitidis
MNLPNKLTVFRILMIPVFMVLALVPFDLGSIQGWGSQVDSRMFLAMLVFAVASLTDYLDGYLARKNNLTTNFGKFADPLADKMLVMTAFIILVELGMAPAWVVAIIVCRELAVTGLRLILVEQGGTVLAAALPGKIKTVTQMFAIIFLLIDNFPLQAISLPLGQILLYTCLFFTIYSGIDYFWNARHIFKGSM

SEQ ID NO: 5639 - DNA, 321 bp, Alloiococcus otitidis
  CDS (64)..(318)
agtaagatttggcccaaggggagggatattgcttgcaaggggaagttgtcaatcaataaaaagatgatggcaaacatttgggtcactgtcttaatctttcctggcaaggctgccgctaaaacagtcccgccctgctcgaccaaaatcaagcgaagacccgtaacagccagctcccggcagacaataatagcaaccacccaggctggggccatgccaagttcaactaagataataaaagctgtcataaccaacatcttgtcagccaagggatcggcaaatttaccaaagttagtggttaagttgttcttccgggccaagtag

SEQ ID NO: 5640 - protein, 85 aa, Alloiococcus otitidis
MMANIWVTVLIFPGKAAAKTVPPCSTKIKRRPVTASSRQTIIATTQAGAMPSSTKIIKAVITNILSAKGSANLPKLVVKLFFRAK

SEQ ID NO: 5641 - DNA, 321 bp, Alloiococcus otitidis; identical to SEQ ID NO: 5639
  CDS (46)..(318)

SEQ ID NO: 5642 - protein, 91 aa, Alloiococcus otitidis
MSINKKMMANIWVTVLIFPGKAAAKTVPPCSTKIKRRPVTASSRQTIIATTQAGAMPSSTKIIKAVITNILSAKGSANLPKLVVKLFFRAK

SEQ ID NO: 5643 - DNA, 651 bp, Alloiococcus otitidis
  CDS (349)..(648)
actgtattgacgaatactttaagttttaggagctttttcatgtactcaattggagaacgactgaaagatgcccgcatgtctaagggctatactattgaagatattcaagaaaagaccaagattaaggcacggtatattaaggcaattgaagaagacaacttggatatcctgccgggggagtcttatgggaagacttttgtcaaactctatgctgaagagctggggtttgatggcgaccagactgcccaagattttgaggaagccaatcatcgttacttcgcccagcagactaaaaaaaaacaaaacaagtctggtaaaaagcctttttaccaagaaagtaatgggagtttggataccattgtttcgtccatgcccatgattatcgtcgtcattttagtgattgccattattgtcggagtttacgtagcggcttcttctgttacatctgaaccagaccaggcctttatccagtcttcaggcgatcaaccggctcaaattatgccagaagattctggtgaccaaaatgaggatttagacccagaagcggaagccgaggatccagagccagcagacgaccaaggccaggatgagctagaagctgaccagcaagaccaggatgacccagagggaattgaggctggcaatggctaa

SEQ ID NO: 5644 - protein, 100 aa, Alloiococcus otitidis
MDTIVSSMPMIIVVILVIAIIVGVYVAASSVTSEPDQAFIQSSGDQPAQIMPEDSGDQNEDLDPEAEAEDPEPADDQGQDELEADQQDQDDPEGIEAGNG

SEQ ID NO: 5645 - DNA, 651 bp, Alloiococcus otitidis; identical to SEQ ID NO: 5643
  CDS (40)..(648)

SEQ ID NO: 5646 - protein, 203 aa, Alloiococcus otitidis
MYSIGERLKDARMSKGYTIEDIQEKTKIKARYIKAIEEDNLDILPGESYGKTFVKLYAEELGFDGDQTAQDFEEANHRYFAQQTKKKQNKSGKKPFYQESNGSLDTIVSSMPMIIVVILVIAIIVGVYVAASSVTSEPDQAFIQSSGDQPAQIMPEDSGDQNEDLDPEAEAEDPEPADDQGQDELEADQQDQDDPEGIEAGNG

SEQ ID NO: 5647 - DNA, 651 bp, Alloiococcus otitidis; identical to SEQ ID NO: 5643
  CDS (7)..(648)

SEQ ID NO: 5648 - protein, 214 aa, Alloiococcus otitidis
MTNTLSFRSFFMYSIGERLKDARMSKGYTIEDIQEKTKIKARYIKAIEEDNLDILPGESYGKTFVKLYAEELGFDGDQTAQDFEEANHRYFAQQTKKKQNKSGKKPFYQESNGSLDTIVSSMPMIIVVILVIAIIVGVYVAASSVTSEPDQAFIQSSGDQPAQIMPEDSGDQNEDLDPEAEAEDPEPADDQGQDELEADQQDQDDPEGIEAGNG

SEQ ID NO: 5649 - DNA, 348 bp, Alloiococcus otitidis
  CDS (61)..(345)
aatgacgacgataatcatgggcatggacgaaacaatggtatccaaactcccattactttcttggtaaaaaggctttttaccagacttgttttgtttttttttagtctgctgggcgaagtaacgatgattggcttcctcaaaatcttgggcagtctggtcgccatcaaaccccagctcttcagcatagagtttgacaaaagtcttcccataagactcccccggcaggatatccaagttgtcttcttcaattgccttaatataccgtgccttaatcttggtcttttcttgaatatcttcaatagtatagcccttagacatgcgggcatctttcagtcgttctccaattga

SEQ ID NO: 5650 - protein, 95 aa, Alloiococcus otitidis
MVKRLFTRLVLFFFSLLGEVTMIGFLKILGSLVAIKPQLFSIEFDKSLPIRLPRQDIQVVFFNCLNIPCLNLGLFLNIFNSIALRHAGIFQSFSN

SEQ ID NO: 5651 - DNA, 1323 bp, Alloiococcus otitidis
  CDS (37)..(1320)
actccagtctatctttatcttgagaggagcagacagatgaaggaaatagtttatgaccaaatcggtgaaaccctctatacggataccctagcaaatggcttgaccgttaaactcctacccaaaaaagattacaacaaaacttatgctatctttgccactgactttgggtccattgataattgttttgtccctctcggccaagaggaaatgaaggaggttccggacggcatcgcccattttttggaacacaagctttttgaaaaagaagatggcgatgttttccaccagttttcaaattacggggcggctgctaatgcttttaccagctttaccaaaacagcctaccttttctcaaccagtgactatgtcaaagagaacttaaccaccctcctggactttgtccaagacccctacttcacaccagaaacggtcaacaaagagaaagggattattggtcaagaaatccaaatgtatgatgatgatcccaactggcggttaatgtttggcctcttagaaaatatctacccggaccatccggtaagcatcgacattgctgggactgtcgaaagtatcgacaagatcaccagtgaccaattatacgaaaactaccataccttctaccatccaagtaatatgactttagtggtagttggccagtttgacccagaggacttgatggccttaattgaagacaaccaaaatgccaagacatttgccccagcagaagttatcaagcgacataagccagatgcagaccttagccattttaaaaaagaagctcaagtcaaaatggatgtttccagacccaaagtggcagtcggaattcgaggcaagcaggctgacttagcaggcctagaaaggctcaagcaagaaattagcttaaaaatcttctttaacatgatcttaggcccttcatccaaacactacctcagcttgtataatgaggaaattattgacgacagtttttattgtgacgtcaactttgaccggtcctttaactttatttccattaccagtgacaccaagcaccctcaaagatttgaagaccgcatcaagaccatcctcttgaagcagacggatcaagaagactttaaccaagaacaattcgacgaggtcaaacgggacttgattggtaagaacctccagtccttaaactcactggaatatattgccaaccaattaacagaaaaaatagaaggggacctcaacgtctttgacctccaagagcttgtccaagacattcaattggatgaccttggccaaatcgttaaggactacctagaccctgactatctatctgtttttaaagtattgcctaaatag

SEQ ID NO: 5652 - protein, 428 aa, Alloiococcus otitidis
MKEIVYDQIGETLYTDTLANGLTVKLLPKKDYNKTYAIFATDFGSIDNCFVPLGQEEMKEVPDGIAHFLEHKLFEKEDGDVFHQFSNYGAAANAFTSFTKTAYLFSTSDYVKENLTTLLDFVQDPYFTPETVNKEKGIIGQEIQMYDDDPNWRLMFGLLENIYPDHPVSIDIAGTVESIDKITSDQLYENYHTFYHPSNMTLVVVGQFDPEDLMALIEDNQNAKTFAPAEVIKRHKPDADLSHFKKEAQVKMDVSRPKVAVGIRGKQADLAGLERLKQEISLKIFFNMILGPSSKHYLSLYNEEIIDDSFYCDVNFDRSFNFISITSDTKHPQRFEDRIKTILLKQTDQEDFNQEQFDEVKRDLIGKNLQSLNSLEYIANQLTEKIEGDLNVFDLQELVQDIQLDDLGQIVKDYLDPDYLSVFKVLPK

SEQ ID NO: 5653 - DNA, 1281 bp, Alloiococcus otitidis
  CDS (292)..(1278)
atgacaaaaataactaatcagaggaggatggccatgcaattagccaagggggtaaacttaaccctaatcccaagcaagaaatttaagaccctttctattaaaattgccttcaaaagtaatctaagtctggaaaaattaacagaacgttctctattggctcggattttagaacgcaacagccgagactatcctagccaggttgacctacaaaaggccttagccaaactttatggggctagttttggtacaagtgtcggacgaagaggccgggtccacagcttgtatttcaacatgaggattgtcaacgatcaatttgttcaagacccagacttattggaaaaagcgcttcagtttttgaaagccgttattttaagacccaacttgggctcagagggatttgatcggcaaacctttgagcgagaaaaagccaatttaaaagacgacttggaatccatttatgacgacaaaaggctgtatgccaagctgaaattattggaccaattttttaccgatccggcccagtcttcctcccttgatggtcggttagaggatttggaccagctagataatgctagtttgtaccaagcctatcagggaatgttagcccaagatgaaatcgatattgtggttttaggcgatactaatgaagaattcttggctaagctattttctgacttcaaatttcaagaccggtctcgcttggacttagacttctactaccaccaggacctaccaagcttccagcgccaggaagaagttcaagacctcatccaggccaagttgaacctggcctaccagactgatgttcgttacttggatgatcaatattttaccctccaagtctttaatgccctctttggtggtttcccgggatctaaactcttcttaaatgtccgggaaaaagagagtttagcctactatgcttccagtaacctagacccctttcgcggaggcttatatgttcaggcggggattgatcagaaagaagcagaccgggtgattgacctgatcaaggatcaacaccaggcccttattgaaggagactttagccaatccagtttgaaccaagccaaggccatgctgaaaaatggcttgaagcagtcggaagattcaccagctggcttgctcaacttttcctatttgaaacagttattggccaagtccatcacagtagaagaatggattgaaaagatcaaccaagtttcggctcaggatgttaagaacctagcgcaagacattaaactccagtctatctttatcttgagaggagcagacagatga

SEQ ID NO: 5654 - protein, 329 aa, Alloiococcus otitidis
MRIVNDQFVQDPDLLEKALQFLKAVILRPNLGSEGFDRQTFEREKANLKDDLESIYDDKRLYAKLKLLDQFFTDPAQSSSLDGRLEDLDQLDNASLYQAYQGMLAQDEIDIVVLGDTNEEFLAKLFSDFKFQDRSRLDLDFYYHQDLPSFQRQEEVQDLIQAKLNLAYQTDVRYLDDQYFTLQVFNALFGGFPGSKLFLNVREKESLAYYASSNLDPFRGGLYVQAGIDQKEADRVIDLIKDQHQALIEGDFSQSSLNQAKAMLKNGLKQSEDSPAGLLNFSYLKQLLAKSITVEEWIEKINQVSAQDVKNLAQDIKLQSIFILRGADR

SEQ ID NO: 5655 - DNA, 1281 bp, Alloiococcus otitidis; identical to SEQ ID NO: 5653
  CDS (1)..(1278)

SEQ ID NO: 5656 - protein, 426 aa, Alloiococcus otitidis
MTKITNQRRMAMQLAKGVNLTLIPSKKFKTLSIKIAFKSNLSLEKLTERSLLARILERNSRDYPSQVDLQKALAKLYGASFGTSVGRRGRVHSLYFNMRIVNDQFVQDPDLLEKALQFLKAVILRPNLGSEGFDRQTFEREKANLKDDLESIYDDKRLYAKLKLLDQFFTDPAQSSSLDGRLEDLDQLDNASLYQAYQGMLAQDEIDIVVLGDTNEEFLAKLFSDFKFQDRSRLDLDFYYHQDLPSFQRQEEVQDLIQAKLNLAYQTDVRYLDDQYFTLQVFNALFGGFPGSKLFLNVREKESLAYYASSNLDPFRGGLYVQAGIDQKEADRVIDLIKDQHQALIEGDFSQSSLNQAKAMLKNGLKQSEDSPAGLLNFSYLKQLLAKSITVEEWIEKINQVSAQDVKNLAQDIKLQSIFILRGADR

SEQ ID NO: 5657 - DNA, 1200 bp, Alloiococcus otitidis
  CDS (1)..(1197)
atgaaagaaagaaaattatttacatccgaatccgtctctgaaggtcaccctgataaggtagcagaccaaatttccgatgctatcttggatgcccttttagcccaagacagtcaatcccgggttgcttgtgaagtcacagtcaatactggtcttgttttaatcacaggtgaaattcggaccactgcctatgttgacatggcccaagttgttcgggaaacattaaaagacattggctacacccgggctaagtacggcttcgatgccgacaatgtagctgttttagtatccatagacgagcagtcacaagacatatctatgggagtagacgaatcgagcgaattcaagggtcaaagccaagatattttagacaaaattggggcgggtgaccagggtttgatgtttggctatgcaacgaaagaaacgtcagaatacatgcccttgcctatttcccttagccacaaactggtccgccgcctagctgaattacgcaaaaatgacagtttaccctacctccgacccgatgccaaggcccaagtcacggtcgagtatgaccaagaccaaaagcctaagcggatcgacacaattgtcatctcaagccagcaccaccctgatgtgtctttagaccagctgtcttctgatattaaaaagcaggtcattcaagctgtcattcctcaagacttattggatgacaagaccaagtacttcattaatccgactggccgttttgtgattggagggccaaagggagatgcaggcctaacgggacgtaaaattattgtcgatacttacgggggttatgccagacatggtggcggagctttttcgggtaaggatgccaccaaggttgatcgttcagcctcttatgcggctcgctacatcgccaagaatattgtagcagctgacctggcggatgaagtggaaattcaattagcttatgccattggcgtagcccaacccgtttccattcatattaatacctttggcaccggccgggttgatcatgaccgattaacggccaaggttcgagaattatttgacttgcgaccagccggcattattcaaatgctggacttgcaacgacctatctacaagcaaactgctacttacggtcacttcggtcgggacgatctggatctgccttgggaacggttggacaaggtggaggatttgaaaacactactgaatgacaaaaataactaa

SEQ ID NO: 5658 - protein, 399 aa, Alloiococcus otitidis
MKERKLFTSESVSEGHPDKVADQISDAILDALLAQDSQSRVACEVTVNTGLVLITGEIRTTAYVDMAQVVRETLKDIGYTRAKYGFDADNVAVLVSIDEQSQDISMGVDESSEFKGQSQDILDKIGAGDQGLMFGYATKETSEYMPLPISLSHKLVRRLAELRKNDSLPYLRPDAKAQVTVEYDQDQKPKRIDTIVISSQHHPDVSLDQLSSDIKKQVIQAVIPQDLLDDKTKYFINPTGRFVIGGPKGDAGLTGRKIIVDTYGGYARHGGGAFSGKDATKVDRSASYAARYIAKNIVAADLADEVEIQLAYAIGVAQPVSIHINTFGTGRVDHDRLTAKVRELFDLRPAGIIQMLDLQRPIYKQTATYGHFGRDDLDLPWERLDKVEDLKTLLNDKNN

SEQ ID NO: 5659 - DNA, 798 bp, Alloiococcus otitidis
  CDS (79)..(795)
acgcattcaacttattcaaaagccagaaacaaggctaatatttttatggtacaatatgtggtgaatacgcagaaagaggtggctttattgaattatcttgatggtaagcgacttgccaagtccttactccttgtctttttacccttgctgagtgtcttcccaggcatggccctcagcctccattacggcaacttcaatgccttttccagctttttatttttactttttgtcctttttaatgcttttatccagggtctaatcaaatctagcccagataaacaaatcccccatctggctattggcttatctatcataaacatggtaatagtcttggtgctatccttaaaccactcctttttcttaggatttaacttagtcctctacatggtgctcattcatataagacctatattttactattatcatttaaatatcttttattccatcttactcttggtcttccaagccatttttttaaacctagcaagtttttttattaatatgaactttatttccctaaacttgcttctctttatagctcccttaatcttaccctacctactctaccaggaagctagattttttaaaaaaagaatttacttaagcaatattcttatttttatgtcaatagctacaacaatccttgccatggtctttgctgtccagttctggtccctccttgctttatttgctgtccccttgatttattacttgagcaaatttttaagtctccatgccgtttatacctgtctttttactataactttattccagcttatttttattacgctctattaa

SEQ ID NO: 5660 - protein, 239 aa, Alloiococcus otitidis
MALLNYLDGKRLAKSLLLVFLPLLSVFPGMALSLHYGNFNAFSSFLFLLFVLFNAFIQGLIKSSPDKQIPHLAIGLSIINMVIVLVLSLNHSFFLGFNLVLYMVLIHIRPIFYYYHLNIFYSILLLVFQAIFLNLASFFINMNFISLNLLLFIAPLILPYLLYQEARFFKKRIYLSNILIFMSIATTILAMVFAVQFWSLLALFAVPLIYYLSKFLSLHAVYTCLFTITLFQLIFITLY

SEQ ID NO: 5661 - DNA, 798 bp, Alloiococcus otitidis; identical to SEQ ID NO: 5659
  CDS (46)..(795)

SEQ ID NO: 5662 - protein, 250 aa, Alloiococcus otitidis
MVQYVVNTQKEVALLNYLDGKRLAKSLLLVFLPLLSVFPGMALSLHYGNFNAFSSFLFLLFVLFNAFIQGLIKSSPDKQIPHLAIGLSIINMVIVLVLSLNHSFFLGFNLVLYMVLIHIRPIFYYYHLNIFYSILLLVFQAIFLNLASFFINMNFISLNLLLFIAPLILPYLLYQEARFFKKRIYLSNILIFMSIATTILAMVFAVQFWSLLALFAVPLIYYLSKFLSLHAVYTCLFTITLFQLIFITLY

SEQ ID NO: 5663 - DNA, 87 bp, Alloiococcus otitidis; identical to SEQ ID NO: 39
  CDS (1)..(84)

SEQ ID NO: 5664 - protein, 28 aa, Alloiococcus otitidis
MDRRVTIDCEVKLKKRSRSESESEEGVE

SEQ ID NO: 5665 - DNA, 969 bp, Alloiococcus otitidis; identical to SEQ ID NO: 4267
  CDS (28)..(966)

SEQ ID NO: 5666 - protein, 313 aa, Alloiococcus otitidis; identical to SEQ ID NO: 4268

SEQ ID NO: 5667 - DNA, 381 bp, Alloiococcus otitidis; identical to SEQ ID NO: 4265
  CDS (100)..(378)

SEQ ID NO: 5668 - protein, 93 aa, Alloiococcus otitidis; identical to SEQ ID NO: 4266

SEQ ID NO: 5669 - DNA, 1371 bp, Alloiococcus otitidis
  CDS (19)..(1368)
ccagtaaaggagttttttatgacccatattgattttgatgatagaaatgttatcggccaatttatttcagaaaccgaagtcagccatataaaagaccaagttgaatcggcccaccagctactccaggagggtggtggacctgggagtgattttttgggttggcttaatttgccgactgactacgatagggatgaatttgcccggatcaaacaggctgccgaaaaaatcaaggaccattctgatatcctgattgttatcggtatagggggatcttacctaggagcaaaggcagctttagactttttgaatcattccttttacaatgaattgccgcaggaagaccggactacaccgcaaattttctttgctggtaacagtatctcttctacttatctcaaggacttagttgagttggtgggggaccgtgatttttcagtcaatgttatttccaaatctgggactacaaccgaaccggccattgcctttcgggtctttaagcatctcttagaaaagaaatatggtaaagacgaagccagaaaccgcatatttgctacaacagacaagtccaaaggagccttgaaaactgtagcggatgaagaaggctacgaaactttcgttatcccagatgatgtcggcggccggttttctgtgttgactcctgttggcctcttgcccatcgcagtaagtggggcagatattgaccaattaatggctggagcccaagctgccagccaagattttgctaaccccaacctagaagataaccaagcttaccaatatgcagctttaagaaatattttataccgcaagggtaaggtaactgaactattaatcaactatgaacctagcctccgctacctatccgaatggtggaaacaattatttggcgagtctgaaggtaaggatcagaaaggcatctacccgtctagtgccaacttttcaaccgaccttcactcattaggccaatttatccaagaaggccggcgcaatctttttgaaacagtaattaaaattgaccagcctcaaaaaggcattaccataccagagcaagaagatgatctggatggtttggactatttagagggcaaagacttagactttgtcaacaccaaggccttccaaggaacgcttttggctcatacagatggtcaggtccctaactttgttattactattcctgatcaaagtccttatactttgggttacctcttttacttttttgaaaaagctgttgcgatttctggctacttgaatgcagttaacccatttgaccaaccaggtgtggaagcctacaaggaaaacatgtttgccttattaggtaaaccaggctacgaagatttagctacagagctcaataaccgactgccctaa

SEQ ID NO: 5670 - protein, 450 aa, Alloiococcus otitidis
MTHIDFDDRNVIGQFISETEVSHIKDQVESAHQLLQEGGGPGSDFLGWLNLPTDYDRDEFARIKQAAEKIKDHSDILIVIGIGGSYLGAKAALDFLNHSFYNELPQEDRTTPQIFFAGNSISSTYLKDLVELVGDRDFSVNVISKSGTTTEPAIAFRVFKHLLEKKYGKDEARNRIFATTDKSKGALKTVADEEGYETFVIPDDVGGRFSVLTPVGLLPIAVSGADIDQLMAGAQAASQDFANPNLEDNQAYQYAALRNILYRKGKVTELLINYEPSLRYLSEWWKQLFGESEGKDQKGIYPSSANFSTDLHSLGQFIQEGRRNLFETVIKIDQPQKGITIPEQEDDLDGLDYLEGKDLDFVNTKAFQGTLLAHTDGQVPNFVITIPDQSPYTLGYLFYFFEKAVAISGYLNAVNPFDQPGVEAYKENMFALLGKPGYEDLATELNNRLP

SEQ ID NO: 5671 - DNA, 393 bp, Alloiococcus otitidis
  CDS (10)..(390)
acacaagagatggaggatgacaagatggcttctatagttggaacaattatagctgagacagcagatgaccagttgtactttttggtgaataaagaaacgaaatcgtttattatcacagactcccaaaaagactgtacggctttagccaccatgattgaagcgtttaaggccattgtatccattaacttcgacaagctcgaattagttgaattaacaaatgcctgccatgaaggggaaaacattcctctctatgttttttcttacccaccaacggaaacggataatgtcaacaaattagttaaggaacctgaccaatatgcttggttgaaccaccgagacttaaaagaaacttttaaccagttaaatattgaaggggttccaagctttcgatga

SEQ ID NO: 5672 - protein, 127 aa, Alloiococcus otitidis
MEDDKMASIVGTIIAETADDQLYFLVNKETKSFIITDSQKDCTALATMIEAFKAIVSINFDKLELVELTNACHEGENIPLYVFSYPPTETDNVNKLVKEPDQYAWLNHRDLKETFNQLNIEGVPSFR

SEQ ID NO: 5673 - DNA, 387 bp, Alloiococcus otitidis
  CDS (10)..(384)
ggtgaagatatgacctataagattggcaatcgtgttgaaggcctagttactggcattcaaccctatggtgcttttgtcaaattggatgagaacacccaaggcttgatccatatttccgaacttgagcacaaatatgtcaaaaatatcactgattttgtccaagtaggtcagaaagtaaaagtagttattctagatattgatgaatatagccaaaagatatctctttccatccgagccctacatgatagcccagtccatcccttcgccaagcggaagaagacgccaaggtatggtaggcggacgggtagtgactttgaacccattgaccagaaactcgaccaatggatccgagatgctctaaaggagctgaaggataaaggccattag

SEQ ID NO: 5674 - protein, 125 aa, Alloiococcus otitidis
MTYKIGNRVEGLVTGIQPYGAFVKLDENTQGLIHISELEHKYVKNITDFVQVGQKVKVVILDIDEYSQKISLSIRALHDSPVHPFAKRKKTPRYGRRTGSDFEPIDQKLDQWIRDALKELKDKGH

SEQ ID NO: 5675 - DNA, 624 bp, Alloiococcus otitidis
  CDS (25)..(621)
ttggaagagattataatgcaaaggatgtcttatatgactaattttccgcagttacatttagaggacagacagactaatcaggctactattcaaaccaatatgggggaaattgacttggtcttgttcgaagaccaagcccctaagacggtgaagaactttattgctttagccaaaaaaggctactatgatggggtaatcttccaccgggtaatccccaattttatgatccaggctggcgacccaactggatcaggcatgggtggggagagtatctatggccatccctttgaagatgagtttagtatggaagtttttaacctaaaaggggccttgtccatggccaattctggtcccaataccaatggtagccagttttttattgtcaccaatgaccaggttcccaaagaaatgctgggtcaattaaaaggggccggcttccctgataagataattgaagcttacaaggatcaaggcgggactccttggctggaccataagcataccgtctttggacatgtgacttctggtcttaaagtagctcaagccatcagccaggtttcacgcaatagcatggacaagcccttggatgatgtagttatcgatagtatcgaaataaaagaatag

SEQ ID NO: 5676 - protein, 199 aa, Alloiococcus otitidis
MSYMTNFPQLHLEDRQTNQATIQTNMGEIDLVLFEDQAPKTVKNFIALAKKGYYDGVIFHRVIPNFMIQAGDPTGSGMGGESIYGHPFEDEFSMEVFNLKGALSMANSGPNTNGSQFFIVTNDQVPKEMLGQLKGAGFPDKIIEAYKDQGGTPWLDHKHTVFGHVTSGLKVAQAISQVSRNSMDKPLDDVVIDSIEIKE

SEQ ID NO: 5677 - DNA, 624 bp, Alloiococcus otitidis; identical to SEQ ID NO: 5675
  CDS (16)..(621)

SEQ ID NO: 5678 - protein, 202 aa, Alloiococcus otitidis
MQRMSYMTNFPQLHLEDRQTNQATIQTNMGEIDLVLFEDQAPKTVKNFIALAKKGYYDGVIFHRVIPNFMIQAGDPTGSGMGGESIYGHPFEDEFSMEVFNLKGALSMANSGPNTNGSQFFIVTNDQVPKEMLGQLKGAGFPDKIIEAYKDQGGTPWLDHKHTVFGHVTSGLKVAQAISQVSRNSMDKPLDDVVIDSIEIKE

SEQ ID NO: 5679 - DNA, 624 bp, Alloiococcus otitidis; identical to SEQ ID NO: 5675
  CDS (1)..(621)

SEQ ID NO: 5680 - protein, 207 aa, Alloiococcus otitidis
MEEIIMQRMSYMTNFPQLHLEDRQTNQATIQTNMGEIDLVLFEDQAPKTVKNFIALAKKGYYDGVIFHRVIPNFMIQAGDPTGSGMGGESIYGHPFEDEFSMEVFNLKGALSMANSGPNTNGSQFFIVTNDQVPKEMLGQLKGAGFPDKIIEAYKDQGGTPWLDHKHTVFGHVTSGLKVAQAISQVSRNSMDKPLDDVVIDSIEIKE

SEQ ID NO: 5681 - DNA, 489 bp, Alloiococcus otitidis
  CDS (133)..(486)
tttttgctctttaacaattacccactcgttgctgctttagcagccattttaatttcacagatccttaaaatccctattgccatggccctccgacggtctccaagcatatgcctcctctttacaactgggggaatgccgagctcacattctgctggggtagccagcttggtaactgccttaattgtagtgaaaggttggcagtctcacttaaccgcaattgccatcacttttgctgtcattgtgatttttgattccatgggggtcagacggcaaagtggcgaacacagtattttaatcaatgaactcttggatgattttaaatccttacgggagagcctggcgaagatcgaccaagacgggaagctagatttagccaccgttgaaaaacattcccggcagatgcttggccataagcccattgaagttttcttcggggtcatagccggcatcctcatttccttgatcttatattttattttttaccagtaa

SEQ ID NO: 5682 - protein, 118 aa, Alloiococcus otitidis
MPSSHSAGVASLVTALIVVKGWQSHLTAIAITFAVIVIFDSMGVRRQSGEHSILINELLDDFKSLRESLAKIDQDGKLDLATVEKHSRQMLGHKPIEVFFGVIAGILISLILYFIFYQ

SEQ ID NO: 5683 - DNA, 489 bp, Alloiococcus otitidis; identical to SEQ ID NO: 5681
  CDS (82)..(486)

SEQ ID NO: 5684 - protein, 135 aa, Alloiococcus otitidis
MALRRSPSICLLFTTGGMPSSHSAGVASLVTALIVVKGWQSHLTAIAITFAVIVIFDSMGVRRQSGEHSILINELLDDFKSLRESLAKIDQDGKLDLATVEKHSRQMLGHKPIEVFFGVIAGILISLILYFIFYQ

SEQ ID NO: 5685 - DNA, 489 bp, Alloiococcus otitidis; identical to SEQ ID NO: 5681
  CDS (4)..(486)

SEQ ID NO: 5686 - protein, 161 aa, Alloiococcus otitidis
MLFNNYPLVAALAAILISQILKIPIAMALRRSPSICLLFTTGGMPSSHSAGVASLVTALIVVKGWQSHLTAIAITFAVIVIFDSMGVRRQSGEHSILINELLDDFKSLRESLAKIDQDGKLDLATVEKHSRQMLGHKPIEVFFGVIAGILISLILYFIFYQ

SEQ ID NO: 5687 - DNA, 279 bp, Alloiococcus otitidis
  CDS (28)..(276)
accactttgaccaggacatttgcttgggtgagaaggtccaatccatccaaaaaaaagaaggcatgtttcagatccaaacccctaagcaagtccactattctaagactattatcattacagtcggccagggagctttcaagccccgcaagcttccctttgattatccagcagtttttgaagaccacaacctccattatgtggtcaaagaccgccagtcctttgccggtaaaaatgtggccgtctttggcgggggtgactctgcagtggattgggccttaa

SEQ ID NO: 5688 - protein, 83 aa, Alloiococcus otitidis
MRRSNPSKKKKACFRSKPLSKSTILRLLSLQSARELSSPASFPLIIQQFLKTTTSIMWSKTASPLPVKMWPSLAGVTLQWIGP

SEQ ID NO: 5689 - DNA, 279 bp, Alloiococcus otitidis; identical to SEQ ID NO: 5687
  CDS (7)..(276)

SEQ ID NO: 5690 - protein, 90 aa, Alloiococcus otitidis
MTRTFAWVRRSNPSKKKKACFRSKPLSKSTILRLLSLQSARELSSPASFPLIIQQFLKTTTSIMWSKTASPLPVKMWPSLAGVTLQWIGP

SEQ ID NO: 5691 - DNA, 1029 bp, Alloiococcus otitidis
  CDS (325)..(1026)
gcaagtttatcgcaagaaaaaggaggaagacttttgaaggaagaagcaattagtgacatcaccatcatcgggggcggtcctgttggcctcttcgctgctttttacgctggattgagacaagctaagaccaagctgattgaatccctgcctatcttaggtggtcaacccaatattttatatcccgaaaaagagatttatgacatccctggccaccctaagataaccggaagcaagataaccaaacagttgatccaacagctagaccactttgaccaggacatttgcttgggtgagaaggtccaatccatccaaaaaaaagaaggcatgtttcagatccaaacccctaagcaagtccactattctaagactattatcattacagtcggccagggagctttcaagccccgcaagcttccctttgattatccagcagtttttgaagaccacaacctccattatgtggtcaaagaccgccagtcctttgccggtaaaaatgtggccgtctttggcgggggtgactctgcagtggattgggccttaagcttagaaccaatcgccaagcaagtctacttagtccaccgccggccaaaattccgggccatggaaagttcggtgcaaaagttacaagactcaggtgttgagatcataaccccttttgttgctagcgattttcaaagcaaagacggaaagacgatttctgctacaaccctaaccaaggcccggtctgatgagacatttgatctaccagttgatgcagttattgtcaattacggtttcgtttcctccttggaaggaattgataattggcaggtggaccaccaagctggcggaatcactgtggaccacaggatggccactagccaagagggaatctttgcagcgggagacgtagcttcctataaagacaagatcaaactcattgcagtcggctttggcgaagcccccattgctgttaaccatgccatccgctacattaacccagacgaacacctccagccaatcttaagcaccagcttaaacttaaattaa

SEQ ID NO: 5692 - protein, 234 aa, Alloiococcus otitidis
MFQIQTPKQVHYSKTIIITVGQGAFKPRKLPFDYPAVFEDHNLHYVVKDRQSFAGKNVAVFGGGDSAVDWALSLEPIAKQVYLVHRRPKFRAMESSVQKLQDSGVEIITPFVASDFQSKDGKTISATTLTKARSDETFDLPVDAVIVNYGFVSSLEGIDNWQVDHQAGGITVDHRMATSQEGIFAAGDVASYKDKIKLIAVGFGEAPIAVNHAIRYINPDEHLQPILSTSLNLN

SEQ ID NO: 5693 - DNA, 1029 bp, Alloiococcus otitidis; identical to SEQ ID NO: 5691
  CDS (34)..(1026)

SEQ ID NO: 5694 - protein, 331 aa, Alloiococcus otitidis
MKEEAISDITIIGGGPVGLFAAFYAGLRQAKTKLIESLPILGGQPNILYPEKEIYDIPGHPKITGSKITKQLIQQLDHFDQDICLGEKVQSIQKKEGMFQIQTPKQVHYSKTIIITVGQGAFKPRKLPFDYPAVFEDHNLHYVVKDRQSFAGKNVAVFGGGDSAVDWALSLEPIAKQVYLVHRRPKFRAMESSVQKLQDSGVEIITPFVASDFQSKDGKTISATTLTKARSDETFDLPVDAVIVNYGFVSSLEGIDNWQVDHQAGGITVDHRMATSQEGIFAAGDVASYKDKIKLIAVGFGEAPIAVNHAIRYINPDEHLQPILSTSLNLN

SEQ ID NO: 5695 - DNA, 540 bp, Alloiococcus otitidis
  CDS (28)..(537)
actaaaagtatgaaaaggaagatatttatgaatatgcaaacagataagagattaaatgaaaaggcagtagctggcattctccaaagaggggtccagttagaagaaattgccgaattggtctatgacctgcaagaatcctatgtcagcaacctgaccatggactactgcctagaaaatgtcaaaaaggtactcgaaaaacgggaagtctgcaatgccgttattacagggattgaacttgaccgattaactgaagaaggaaaggtgtcagaacccctctcctccatcatcgaagcggatgaaggcctgtatggaatcgatgaagttttagctttagccatcgtcaatgtttatggatccattggcctaaccaatttcggttatctagacaagttaaagcctaaggtaataaagcgtttggacaaccacaagcacaaggaccaaaccaacaccttcttagatgatattgtcggcgccattgccgcagctgctgctagtcgaattgcccacgccgaccccgatgtatccaagaatatgcaataa

SEQ ID NO: 5696 - protein, 170 aa, Alloiococcus otitidis
MNMQTDKRLNEKAVAGILQRGVQLEEIAELVYDLQESYVSNLTMDYCLENVKKVLEKREVCNAVITGIELDRLTEEGKVSEPLSSIIEADEGLYGIDEVLALAIVNVYGSIGLTNFGYLDKLKPKVIKRLDNHKHKDQTNTFLDDIVGAIAAAAASRIAHADPDVSKNMQ

SEQ ID NO: 5697 - DNA, 540 bp, Alloiococcus otitidis; identical to SEQ ID NO: 5695
  CDS (10)..(537)

SEQ ID NO: 5698 - protein, 176 aa, Alloiococcus otitidis
MKRKIFMNMQTDKRLNEKAVAGILQRGVQLEEIAELVYDLQESYVSNLTMDYCLENVKKVLEKREVCNAVITGIELDRLTEEGKVSEPLSSIIEADEGLYGIDEVLALAIVNVYGSIGLTNFGYLDKLKPKVIKRLDNHKHKDQTNTFLDDIVGAIAAAAASRIAHADPDVSKNMQ

SEQ ID NO: 5699 - DNA, 654 bp, Alloiococcus otitidis
  CDS (4)..(651)
cggatgtttaaggggggaagaagtaggctaaaggatgtcatcttttacttgttcttgtttgtggcggttgtaacctttgccattgcagtaaccatcctcttaacgcctttactggaaattaatttgtccctaaataatatccctgaacaggtcggcctatccatagaccggataatggagaattactatgtcttattagaatacctccactttccttgggtgaccgaacttgccatgccagactttcccacctcccctagtggagcctttcacttttatgaagtcaagcaactctttttactcaattatggcctactctttgtcagtctgccttttgccatttactatttggtgaaactcaagcaaaccaaccaagtatacgagttggaaaaacctgccctggttgcggccatcctgcctttgggtcttttggtctttttagccatcaattttgaccgcttgtttttgaccttccatgaaattttatttgacaatgatgcctggctatttaatcctcaaaccgatcctattatcaatgtcttaacccaggacttctttatgttgtgttttgcttttgccattgtcttgattgaagctttatttattactggctacgttttggctaggcgggaccgactcagacaaggggtttag

SEQ ID NO: 5700 - protein, 216 aa, Alloiococcus otitidis
MFKGGRSRLKDVIFYLFLFVAVVTFAIAVTILLTPLLEINLSLNNIPEQVGLSIDRIMENYYVLLEYLHFPWVTELAMPDFPTSPSGAFHFYEVKQLFLLNYGLLFVSLPFAIYYLVKLKQTNQVYELEKPALVAAILPLGLLVFLAINFDRLFLTFHEILFDNDAWLFNPQTDPIINVLTQDFFMLCFAFAIVLIEALFITGYVLARRDRLRQGV

SEQ ID NO: 5701 - DNA, 792 bp, Alloiococcus otitidis
  CDS (13)..(789)
aggagtgttagtatgtcggatgaaaaacaggattacaagggctatttagtcgatttagatggaactatgtatatggggcctgaccccattgaagaggccggaccttttattgaccgcttgcgccaggccaatctacctttcttgttcttatccaataactcgaccgcctcaccccaggatgttgcagataagttaggcaagatgggggttcaggcccaggcagaagaagtttacacttcttcattagccactgttgactacttgaattcccggccaggggactctgtttatattatcggcgaatcaggcttgctagatgctgtagaagaagcgggctacaagtgggatgaagaccagcctgattttgtcttagttggtttagaccggaaagtaacctatgagaaatttaatatagcaaccttggccatccaaaagggagcagaatttatttgcactaacagagataccaatatcccgactgaccgaggcatgtctccgagtgctggagccttggcagcctttttagagcgggcaaccggccaggagcctaagtatattggtaaaccagaagccaccatcatggacaaggggattgagcgcttaggccttgccaaggaagatgtggccatggttggcgacaattatgatacagatatcctagctgggattaacaatggcattgacaccatcctggtcttttctggcttgaccagccctgaagaattggctgaaaaagacaagcagcccacccacactattaacagtcttgacgattggttgacggatgtttaa

SEQ ID NO: 5702 - protein, 259 aa, Alloiococcus otitidis
MSDEKQDYKGYLVDLDGTMYMGPDPIEEAGPFIDRLRQANLPFLFLSNNSTASPQDVADKLGKMGVQAQAEEVYTSSLATVDYLNSRPGDSVYIIGESGLLDAVEEAGYKWDEDQPDFVLVGLDRKVTYEKFNIATLAIQKGAEFICTNRDTNIPTDRGMSPSAGALAAFLERATGQEPKYIGKPEATIMDKGIERLGLAKEDVAMVGDNYDTDILAGINNGIDTILVFSGLTSPEELAEKDKQPTHTINSLDDWLTDV

SEQ ID NO: 5703 - DNA, 246 bp, Alloiococcus otitidis
  CDS (13)..(243)
ttgtcgccaaccatggccacatcttccttggcaaggcctaagcgctcaatccccttgtccatgatggtggcttctggtttaccaatatacttaggctcctggccggttgcccgctctaaaaaggctgccaaggctccagcactcggagacatgcctcggtcagtcgggatattggtatctctgttagtgcaaataaattctgctcccttttggatggccaaggttgctatattaaatttctcatag

SEQ ID NO: 5704 - protein, 77 aa, Alloiococcus otitidis
MATSSLARPKRSIPLSMMVASGLPIYLGSWPVARSKKAAKAPALGDMPRSVGILVSLLVQINSAPFWMAKVAILNFS

SEQ ID NO: 5705 - DNA, 246 bp, Alloiococcus otitidis; identical to SEQ ID NO: 5703
  CDS (1)..(243)

SEQ ID NO: 5706 - protein, 81 aa, Alloiococcus otitidis
MSPTMATSSLARPKRSIPLSMMVASGLPIYLGSWPVARSKKAAKAPALGDMPRSVGILVSLLVQINSAPFWMAKVAILNFS

SEQ ID NO: 5707 - DNA, 666 bp, Alloiococcus otitidis
  CDS (4)..(663)
ttcatggctaaaaaaagtaaggcttctcttgaccctaaagtggatgccttaattgatgaccaagtcaagggggtagaccaagacaagttggttaaacgacttgatgctgaacacttggacctcaatggggcaacctatttaatcttggaagaccaaggtcaagctttagatatcgaccaggttaatgaccgctatactcctttttttgacaagtttcactacatcgtaggggatatctctaagggtcagttacgactcaagggtttttaccgcaatgaccaagacaaggttcccgaagagatgaaaattggccaactagatgattatataatggaagattgcagttttgccgccccttactttgtcttggaacggcaggctgagatcacaaatttccatccctacaagccggaaatgtttaactataaaagccaaccttcccataacaaggaccggtataaacaccaaaaaaataagaaaaataaaagacgaaaacagcaaaaagctggtggagacttcaaaaagagaagcaggtcgccgaagtttaaaaagaaaaatcggcaaaaataccactaccagcctggtgaagatgactactacaatgaagttgaaaccgtcaaagatgaaaaaggacaagccaagtttaagataaaccgtaagcaataa

SEQ ID NO: 5708 - protein, 220 aa, Alloiococcus otitidis
MAKKSKASLDPKVDALIDDQVKGVDQDKLVKRLDAEHLDLNGATYLILEDQGQALDIDQVNDRYTPFFDKFHYIVGDISKGQLRLKGFYRNDQDKVPEEMKIGQLDDYIMEDCSFAAPYFVLERQAEITNFHPYKPEMFNYKSQPSHNKDRYKHQKNKKNKRRKQQKAGGDFKKRSRSPKFKKKNRQKYHYQPGEDDYYNEVETVKDEKGQAKFKINRKQ

SEQ ID NO: 5709 - DNA, 396 bp, Alloiococcus otitidis
  CDS (148)..(393)
atagcccttgtaatcctgtttttcatccgacatactaacactcctttattgcttacggtttatcttaaacttggcttgtcctttttcatctttgacggtttcaacttcattgtagtagtcatcttcaccaggctggtagtggtatttttgccgatttttctttttaaacttcggcgacctgcttctctttttgaagtctccaccagctttttgctgttttcgtcttttatttttcttatttttttggtgtttataccggtccttgttatgggaaggttggcttttatagttaaacatttccggcttgtagggatggaaatttgtgatctcagcctgccgttccaagacaaagtaaggggcggcaaaactgcaatcttccattatataatcatctag

SEQ ID NO: 5710 - protein, 82 aa, Alloiococcus otitidis
MPIFLFKLRRPASLFEVSTSFLLFSSFIFLIFLVFIPVLVMGRLAFIVKHFRLVGMEICDLSLPFQDKVRGGKTAIFHYIII

SEQ ID NO: 5711 - DNA, 396 bp, Alloiococcus otitidis; identical to SEQ ID NO: 5709
  CDS (139)..(393)

SEQ ID NO: 5712 - protein, 85 aa, Alloiococcus otitidis
MVFLPIFLFKLRRPASLFEVSTSFLLFSSFIFLIFLVFIPVLVMGRLAFIVKHFRLVGMEICDLSLPFQDKVRGGKTAIFHYIII

SEQ ID NO: 5713 - DNA, 630 bp, Alloiococcus otitidis
  CDS (37)..(627)
aacttgaattatttccctagagaggttggtatcttcgtggtccaaaaatattatgccgtcaaaaagggccggaaaccaggactctacacctcatggccacaagcccaaaaccaggttagccactatcccaaagcagaatacaagtcctttaaagacaaagcccaagccctccaatacttaaataatggcttggaaaatgccaaagaaactagtcagggcctccaagcctacgtcgacggatccttcgataaaaagcaaaaaaactacagctatggtgttgtcctcctagaagatggcaagcttgtagccaagttagccaacagtgacaatgatcctaggtatgcggccagctatcaaatcgctggcgagtgctatggttgcctcaatgccatcaaatgggccattaaccattcctataaccatatcaccattttttatgactatatggggattgaaaaatgggctaaaaaagaatggcaggctaagaaagttatctcccaggactatgttcgcttttacgaccgctttgcccaaaatattgaggttgactttgtcaaggtcaaggcccactctggcgtctccatgaatgaacttgccgaccaattggctaaagacgccttgaaacaataa

SEQ ID NO: 5714 - protein, 197 aa, Alloiococcus otitidis
MVQKYYAVKKGRKPGLYTSWPQAQNQVSHYPKAEYKSFKDKAQALQYLNNGLENAKETSQGLQAYVDGSFDKKQKNYSYGVVLLEDGKLVAKLANSDNDPRYAASYQIAGECYGCLNAIKWAINHSYNHITIFYDYMGIEKWAKKEWQAKKVISQDYVRFYDRFAQNIEVDFVKVKAHSGVSMNELADQLAKDALKQ

SEQ ID NO: 5715 - DNA, 630 bp, Alloiococcus otitidis; identical to SEQ ID NO: 5713
  CDS (4)..(627)

SEQ ID NO: 5716 - protein, 208 aa, Alloiococcus otitidis
MNYFPREVGIFVVQKYYAVKKGRKPGLYTSWPQAQNQVSHYPKAEYKSFKDKAQALQYLNNGLENAKETSQGLQAYVDGSFDKKQKNYSYGVVLLEDGKLVAKLANSDNDPRYAASYQIAGECYGCLNAIKWAINHSYNHITIFYDYMGIEKWAKKEWQAKKVISQDYVRFYDRFAQNIEVDFVKVKAHSGVSMNELADQLAKDALKQ

SEQ ID NO: 5717 - DNA, 822 bp, Alloiococcus otitidis
  CDS (16)..(819)
agtggaggaagactaatggagtggattaatttaaataatggtcagaccatgccacttttagggacagggaccaacacatatggcaaagttgaccaggactataatggggaattaaacggcgactttgcacccttggaaagtgccctgaggctcggttaccgcttagtcgacacggctattgtctaccgtaatgaggcaggcgttggcgctaccctggcacgtagtaacgttgaccgacaagacttatttgtgacgactaaaattcctaatgacgaaagctatacccattcagaagaaagcatccgccagaccatcgaccggtccctggctcgttttggcaccgactatctagacttgtacttgatccacaaacccagctcgaacccatcagtcaccaagcggatctggcaggttttagaagattattatgaccaaggcaagctcaaaaatattggggtgtctaacttttcagcccagcaaatcgaagacttgaagtcctatgccaaaattatgccagcagtcaaccaaattcaaattaacctggaagagaagaaccaagacttaattgactacttacaaggccaaaagatcgtcccaaccgcctggggtcccatgaagtccagtccagaccagcgtcaagccttagctaaaattggcaaaaaatacggtaaagcttggtcccaggttctcctacgctaccaagttcaaagggggattgtggtcattcccaaatcccataacccgaacaaccaagccctcaacttggatatctttgattttgacttatcctcagaagatatggcccaagtttctcaactctag

SEQ ID NO: 5718 - protein, 268 aa, Alloiococcus otitidis
MEWINLNNGQTMPLLGTGTNTYGKVDQDYNGELNGDFAPLESALRLGYRLVDTAIVYRNEAGVGATLARSNVDRQDLFVTTKIPNDESYTHSEESIRQTIDRSLARFGTDYLDLYLIHKPSSNPSVTKRIWQVLEDYYDQGKLKNIGVSNFSAQQIEDLKSYAKIMPAVNQIQINLEEKNQDLIDYLQGQKIVPTAWGPMKSSPDQRQALAKIGKKYGKAWSQVLLRYQVQRGIVVIPKSHNPNNQALNLDIFDFDLSSEDMAQVSQL

SEQ ID NO: 5719 - DNA, 936 bp, Alloiococcus otitidis
  CDS (307)..(933)
tataagagcaaatttaatggggaggttcttatcgtggcaagccgggaagaaagagtcaagttatccgaacggggggcatgggtgtccattattgtctacatcatcctagccctggtcaaggctggatcagggctcatttttaattcagctacccttttggctgatggcctcaacaattttaccgataccatctctagcattgccgtcttaattggattaaaaacagccaggaaaccggcagacgacgaccacccttatggtcactggaaggccgagccaatcgctagtttggtcacctcctttattatgcttttcttgagcctacaacttcttatctctgccatcaccagcttaatccggcaagaagttaaccagcctccttcaaacctggctgccatcatttccttattggccatgctggttttgttggctgttgcaggctacaaccgtaaaatagccatagagtcttccagttttggcttagaagctgtaagtaaggacaacctaaatgatgctttgacctccctagctaccgccttggccatctttacttcgtcgctcaatttagcctggttggaccaggtcatggccattgtcattgccctcattatcttaaagacaggaattggtgtctttaaacagtcctccttcgccctgtcagatggctttgatgactcgctcctccaggcctaccatgaccggattagtcagctagaggaagtccaagccatcccccaattaaaggcccggatgtacggagccaatatttatgtagattgtaccatcttggtccaggcccagatgaccgtccaagaaagtcatgatatcacagaagtcatcgaaaaaattctctatgaggaatttgatgtgatgcataccgatgtccacgtggaaccccacaatatccaggatcaattttccgatgaacaaatgtaa

SEQ ID NO: 5720 - protein, 209 aa, Alloiococcus otitidis
MLFLSLQLLISAITSLIRQEVNQPPSNLAAIISLLAMLVLLAVAGYNRKIAIESSSFGLEAVSKDNLNDALTSLATALAIFTSSLNLAWLDQVMAIVIALIILKTGIGVFKQSSFALSDGFDDSLLQAYHDRISQLEEVQAIPQLKARMYGANIYVDCTILVQAQMTVQESHDITEVIEKILYEEFDVMHTDVHVEPHNIQDQFSDEQM

SEQ ID NO: 5721 - DNA, 936 bp, Alloiococcus otitidis; identical to SEQ ID NO: 5719
  CDS (157)..(933)

SEQ ID NO: 5722 - protein, 259 aa, Alloiococcus otitidis
MADGLNNFTDTISSIAVLIGLKTARKPADDDHPYGHWKAEPIASLVTSFIMLFLSLQLLISAITSLIRQEVNQPPSNLAAIISLLAMLVLLAVAGYNRKIAIESSSFGLEAVSKDNLNDALTSLATALAIFTSSLNLAWLDQVMAIVIALIILKTGIGVFKQSSFALSDGFDDSLLQAYHDRISQLEEVQAIPQLKARMYGANIYVDCTILVQAQMTVQESHDITEVIEKILYEEFDVMHTDVHVEPHNIQDQFSDEQM

SEQ ID NO: 5723 - DNA, 936 bp, Alloiococcus otitidis; identical to SEQ ID NO: 5719
  CDS (34)..(933)

SEQ ID NO: 5724 - protein, 300 aa, Alloiococcus otitidis
MASREERVKLSERGAWVSIIVYIILALVKAGSGLIFNSATLLADGLNNFTDTISSIAVLIGLKTARKPADDDHPYGHWKAEPIASLVTSFIMLFLSLQLLISAITSLIRQEVNQPPSNLAAIISLLAMLVLLAVAGYNRKIAIESSSFGLEAVSKDNLNDALTSLATALAIFTSSLNLAWLDQVMAIVIALIILKTGIGVFKQSSFALSDGFDDSLLQAYHDRISQLEEVQAIPQLKARMYGANIYVDCTILVQAQMTVQESHDITEVIEKILYEEFDVMHTDVHVEPHNIQDQFSDEQM

SEQ ID NO: 5725 - DNA, 1041 bp, Alloiococcus otitidis
  CDS (46)..(1038)
aataaacttgaaggaaagtgtaaacgtttaaaaggagtgaagagcatggatccctttaaaggacttattgttcgccaggaagacgaccaggtgacttaccaaattgaagatttaactttagatgacttgacccaaggacctattactatcaaagtagattattcgacagttaactacaaggacatgcttgccacccaggccaagggtggggtggtccgcgactatcccatgattccaggtattgacctggtggggcaggtggtggaatctcaagatgagcacttcaagcctggagaaaacgttatggtaatctccaccgacttgggggtttccaaaacagggggctttgcccaatatgtccgaacagatgctgaccacttgacccgtctgccggaggggctcagtccaaaggatgccatgacctttggcacagctggctttactgctgccctgtctatccaggccctagaagaccacggtttgtctcttgaggaagatcccaatattttaatcactggtgccacaggtggagtggggagcgtagccctcaaaattctaagccacttgggttacactaagctccatgccttggttcgtaaagattaccaggtggaagtagcccaaaaattaggagccaattttattgtccaggctcaagacttggcagcaggtcggtcgactttagacagccgaaacttccaatatgttttagacacggtaggtggagatgttgcaagcaaagccctagctcaaatagaccacaatggcgctatgtccatgtgcgggaatgctggtggggctaagatggaagcttccgtcctgccctttatcttaagaggggtcaatgtcttggggattaactcggtcagctatccgctagaggccaaggccaagatttggcagaagttagctcaagaatggaatgtagcagaccaattagtgacctctgaagtcccattgaaagacctagaccagaccatcaccgccttaaaagaaggcaaacacttgggtcggacagtggtcaagctaaacgatcaataa

SEQ ID NO: 5726 - protein, 331 aa, Alloiococcus otitidis
MDPFKGLIVRQEDDQVTYQIEDLTLDDLTQGPITIKVDYSTVNYKDMLATQAKGGVVRDYPMIPGIDLVGQVVESQDEHFKPGENVMVISTDLGVSKTGGFAQYVRTDADHLTRLPEGLSPKDAMTFGTAGFTAALSIQALEDHGLSLEEDPNILITGATGGVGSVALKILSHLGYTKLHALVRKDYQVEVAQKLGANFIVQAQDLAAGRSTLDSRNFQYVLDTVGGDVASKALAQIDHNGAMSMCGNAGGAKMEASVLPFILRGVNVLGINSVSYPLEAKAKIWQKLAQEWNVADQLVTSEVPLKDLDQTITALKEGKHLGRTVVKLNDQ

SEQ ID NO: 5727 - DNA, 1041 bp, Alloiococcus otitidis; identical to SEQ ID NO: 5725
  CDS (37)..(1038)

SEQ ID NO: 5728 - protein, 334 aa, Alloiococcus otitidis
MKSMDPFKGLIVRQEDDQVTYQIEDLTLDDLTQGPITIKVDYSTVNYKDMLATQAKGGVVRDYPMIPGIDLVGQVVESQDEHFKPGENVMVISTDLGVSKTGGFAQYVRTDADHLTRLPEGLSPKDAMTFGTAGFTAALSIQALEDHGLSLEEDPNILITGATGGVGSVALKILSHLGYTKLHALVRKDYQVEVAQKLGANFIVQAQDLAAGRSTLDSRNFQYVLDTVGGDVASKALAQIDHNGAMSMCGNAGGAKMEASVLPFILRGVNVLGINSVSYPLEAKAKIWQKLAQEWNVADQLVTSEVPLKDLDQTITALKEGKHLGRTVVKLNDQ

SEQ ID NO: 5729 - DNA, 1284 bp, Alloiococcus otitidis
  CDS (253)..(1281)
gctatgattgatttaatgatgtgtcacgattttaggagggatcacttggaaaataggacaagaaaacactggctggttttactggcggcttgtggaatggcggcttcttctttggggattaacatgaatgccatgggcgtcttttaccaacccattgcagacgatttaggcttgtatgtcggaacagttgcctttcaaaccactatggctgccattttcttagctataattgggacttttgtccaccgcattttgtcatggtttcgctttagacaaatggcggtttttggagcgatcttagccggtttatcgattgccagtatttcactggtctcaagcccctttttatttaatcttttgggtgtcttgcgggggattggatctggcttgatttcggtggtcccttttactctactcattaacaattggtttgaagaaaaaaatggcctagccctcagcatcgcaacctccttcgccggcctggtcggggttattttatcaccggttatgacctggtgtattagccagtttggctggcggacctccgctgtgataactggcggcctctttattttctttaacctaccgatcttattaatgggagtccggctcaatccaagagatgaaggcttattggcttatggcgagacaagtttgccagaccgcgacttggtgggggaaagaccattggaattgacccctaaccagtcctttaactataccagccctctcttcctgtccctggtctttattgccttgttctaccccttgtcaaccggactttcccaaaacctaccaggctttgccttgtcgaagggtttcaacttggaatttggggctagtttactgtcggcagccatgttggctaatattattttcaaactcatcctgggccccttggctaataaaattggccccaccaaaacaactatttattcagccttagtcctggtcttcgcctatgggattttactgaccagccagcatacgggtctcttgctggttggagccttcctgtatggaatttgttactttgtccctcctttggccttgccacttttgaccaatcaattttttgggaaatcccaggcaaaccgtatctatccctttatctctcttttgactggtttgtcaggtgccttttcgatttcggccattggctatgtttatgacttcactcaatcatatgaagtggctattttgaccttgctggtggtgacaggcttgagtattgccttattaatttattgtttaggacagttgaaagaccaaggtaaggcctag

SEQ ID NO: 5730 - protein, 343 aa, Alloiococcus otitidis
MSWFRFRQMAVFGAILAGLSIASISLVSSPFLFNLLGVLRGIGSGLISVVPFTLLINNWFEEKNGLALSIATSFAGLVGVILSPVMTWCISQFGWRTSAVITGGLFIFFNLPILLMGVRLNPRDEGLLAYGETSLPDRDLVGERPLELTPNQSFNYTSPLFLSLVFIALFYPLSTGLSQNLPGFALSKGFNLEFGASLLSAAMLANIIFKLILGPLANKIGPTKTTIYSALVLVFAYGILLTSQHTGLLLVGAFLYGICYFVPPLALPLLTNQFFGKSQANRIYPFISLLTGLSGAFSISAIGYVYDFTQSYEVAILTLLVVTGLSIALLIYCLGQLKDQGKA

SEQ ID NO: 5731 - DNA, 1284 bp, Alloiococcus otitidis; identical to SEQ ID NO: 5729
  CDS (97)..(1281)

SEQ ID NO: 5732 - protein, 395 aa, Alloiococcus otitidis
MAASSLGINMNAMGVFYQPIADDLGLYVGTVAFQTTMAAIFLAIIGTFVHRILSWFRFRQMAVFGAILAGLSIASISLVSSPFLFNLLGVLRGIGSGLISVVPFTLLINNWFEEKNGLALSIATSFAGLVGVILSPVMTWCISQFGWRTSAVITGGLFIFFNLPILLMGVRLNPRDEGLLAYGETSLPDRDLVGERPLELTPNQSFNYTSPLFLSLVFIALFYPLSTGLSQNLPGFALSKGFNLEFGASLLSAAMLANIIFKLILGPLANKIGPTKTTIYSALVLVFAYGILLTSQHTGLLLVGAFLYGICYFVPPLALPLLTNQFFGKSQANRIYPFISLLTGLSGAFSISAIGYVYDFTQSYEVAILTLLVVTGLSIALLIYCLGQLKDQGKA

SEQ ID NO: 5733 - DNA, 1284 bp, Alloiococcus otitidis; identical to SEQ ID NO: 5729
  CDS (16)..(1281)

SEQ ID NO: 5734 - protein, 422 aa, Alloiococcus otitidis
MMCHDFRRDHLENRTRKHWLVLLAACGMAASSLGINMNAMGVFYQPIADDLGLYVGTVAFQTTMAAIFLAIIGTFVHRILSWFRFRQMAVFGAILAGLSIASISLVSSPFLFNLLGVLRGIGSGLISVVPFTLLINNWFEEKNGLALSIATSFAGLVGVILSPVMTWCISQFGWRTSAVITGGLFIFFNLPILLMGVRLNPRDEGLLAYGETSLPDRDLVGERPLELTPNQSFNYTSPLFLSLVFIALFYPLSTGLSQNLPGFALSKGFNLEFGASLLSAAMLANIIFKLILGPLANKIGPTKTTIYSALVLVFAYGILLTSQHTGLLLVGAFLYGICYFVPPLALPLLTNQFFGKSQANRIYPFISLLTGLSGAFSISAIGYVYDFTQSYEVAILTLLVVTGLSIALLIYCLGQLKDQGKA

SEQ ID NO: 5735 - DNA, 1284 bp, Alloiococcus otitidis; identical to SEQ ID NO: 5729
  CDS (4)..(1281)

SEQ ID NO: 5736 - protein, 426 aa, Alloiococcus otitidis
MIDLMMCHDFRRDHLENRTRKHWLVLLAACGMAASSLGINMNAMGVFYQPIADDLGLYVGTVAFQTTMAAIFLAIIGTFVHRILSWFRFRQMAVFGAILAGLSIASISLVSSPFLFNLLGVLRGIGSGLISVVPFTLLINNWFEEKNGLALSIATSFAGLVGVILSPVMTWCISQFGWRTSAVITGGLFIFFNLPILLMGVRLNPRDEGLLAYGETSLPDRDLVGERPLELTPNQSFNYTSPLFLSLVFIALFYPLSTGLSQNLPGFALSKGFNLEFGASLLSAAMLANIIFKLILGPLANKIGPTKTTIYSALVLVFAYGILLTSQHTGLLLVGAFLYGICYFVPPLALPLLTNQFFGKSQANRIYPFISLLTGLSGAFSISAIGYVYDFTQSYEVAILTLLVVTGLSIALLIYCLGQLKDQGKA

SEQ ID NO: 5737 - DNA, 786 bp, Alloiococcus otitidis
  CDS (148)..(783)
cctagcctctatgagatgtcaattagaactattttggtcatctcattggccggatttagggctagagcagacaatattcttgcattctccccaaccatcctctataattgttacgttaaaacactatgcaagaagaaaggattcgatatgagtttagaaattagaaagtacaaggagtctgactttgactcagttcaccgatttattacaaacacctggtatgccgatgctgcaaaggaagatcctgcagtcgcccatgcttttgtaacggttgatgttaactcacatctccacaatagctcttttggtttgacggcagaattagatggcgaagtcgttggggttttctttggctttgtggttgaccatcccaaagaaatgcgcctctttgaacgcgacatcgtacctgaattacagaaattttttgagacagatacagaactcagcgagaacttaatcaagtcgataaacgaagaacaccaggccaatgaccaattaaacgaaaatttaaaagacccttaccaaggtcaaatccaattatttattgtcgacagcagtaagcgtgggcaaaatgtagggggtaccctgtggaatgctggccagaaaatctttgaagaagcaggtgtggaacgctttatcctccataccgacaccgattgtgactacggctactacgatgcaaaaggcctagactcccttgacccggtcgttatcactgatgacgagggcaatgaatcaattgattacatgctctaccacggcgaagttgaaaaagaagacgaataa

SEQ ID NO: 5738 - protein, 212 aa, Alloiococcus otitidis
MSLEIRKYKESDFDSVHRFITNTWYADAAKEDPAVAHAFVTVDVNSHLHNSSFGLTAELDGEVVGVFFGFVVDHPKEMRLFERDIVPELQKFFETDTELSENLIKSINEEHQANDQLNENLKDPYQGQIQLFIVDSSKRGQNVGGTLWNAGQKIFEEAGVERFILHTDTDCDYGYYDAKGLDSLDPVVITDDEGNESIDYMLYHGEVEKEDE

SEQ ID NO: 5739 - DNA, 786 bp, Alloiococcus otitidis; identical to SEQ ID NO: 5737
  CDS (16)..(783)

SEQ ID NO: 5740 - protein, 256 aa, Alloiococcus otitidis
MSIRTILVISLAGFRARADNILAFSPTILYNCYVKTLCKKKGFDMSLEIRKYKESDFDSVHRFITNTWYADAAKEDPAVAHAFVTVDVNSHLHNSSFGLTAELDGEVVGVFFGFVVDHPKEMRLFERDIVPELQKFFETDTELSENLIKSINEEHQANDQLNENLKDPYQGQIQLFIVDSSKRGQNVGGTLWNAGQKIFEEAGVERFILHTDTDCDYGYYDAKGLDSLDPVVITDDEGNESIDYMLYHGEVEKEDE

SEQ ID NO: 5741 - DNA, 513 bp, Alloiococcus otitidis
  CDS (19)..(510)
tcttgggcattgacccggatgatattcaagccaaatttgcccaccaagctgtccatgacttggtcaccttcatttttgcggaggagaccatggtccacgaagatacaagtgagttggtcgccgatagcttcatttaataagacaccggttactgaagagtcaaccccgccagacaaggctaggaggacttttttctcgccaactgtatccttgatctcttggatggctaggtcgataaatttacccatgtcccagttaccagaacagccacaaatgtcaaaggtaaattgtttgagcatgtccttgccgtgcttggtgtggcccacttcggggtggaactggacagcatggatatttcgactcaggtcttgcatggctgcaatcggacagtgggggttttgggcagtgacttggaagccatcagggacttccttgactaggtcaccatggctcatccaaacttcttcttcctggtcgagcccttggaagagttgtccgttttggtcggtttga

SEQ ID NO: 5742 - protein, 164 aa, Alloiococcus otitidis
MIFKPNLPTKLSMTWSPSFLRRRPWSTKIQVSWSPIASFNKTPVTEESTPPDKARRTFFSPTVSLISWMARSINLPMSQLPEQPQMSKVNCLSMSLPCLVWPTSGWNWTAWIFRLRSCMAAIGQWGFWAVTWKPSGTSLTRSPWLIQTSSSWSSPWKSCPFWSV

SEQ ID NO: 5743 - DNA, 513 bp, Alloiococcus otitidis; identical to SEQ ID NO: 5741
  CDS (10)..(510)

SEQ ID NO: 5744 - protein, 167 aa, Alloiococcus otitidis
MTRMIFKPNLPTKLSMTWSPSFLRRRPWSTKIQVSWSPIASFNKTPVTEESTPPDKARRTFFSPTVSLISWMARSINLPMSQLPEQPQMSKVNCLSMSLPCLVWPTSGWNWTAWIFRLRSCMAAIGQWGFWAVTWKPSGTSLTRSPWLIQTSSSWSSPWKSCPFWSV

SEQ ID NO: 5745 - DNA, 360 bp, Alloiococcus otitidis
  CDS (13)..(357)
attatttcagcaatgcttgcctttatttcttctttatccataagccccccctttcaaaggttatcgttagccattataccatgtctattgccgtactcacaggccaataaaaaagctaagaagtccttggacttcttagctatcgtcttattcccactcaactgttgcaggtggcttagaggtgatgtcgtaaacgacccggttgatgtggtcggtttcattaactatccggcgactaatggtgtccaagacatcaaaaggaatcttggcccaatcagctgtcatcccgtctacagaattaactgcccggatgccaatggtgtagtcataagtccggttgtcgcccatgacaccgactga

SEQ ID NO: 5746 - protein, 115 aa, Alloiococcus otitidis
MLAFISSLSISPPFQRLSLAIIPCLLPYSQANKKAKKSLDFLAIVLFPLNCCRWLRGDVVNDPVDVVGFINYPATNGVQDIKRNLGPISCHPVYRINCPDANGVVISPVVAHDTD

SEQ ID NO: 5747 - DNA, 1572 bp, Alloiococcus otitidis
  CDS (205)..(1569)
agagggagtgtttttttgaacaatattgaacaagttaaggacctcgagcaaattgtagtactcgactacggtagtcaatacaaccaacttatcaccagacgaatccgtgaatttggggtttatactgaactcctttcccacaaggtaactgctgaagagttaaaggaacgcaatatcaaaggcatcattttatctgggggaccaatgtcagtctttgaccaaaattccttcgcattagacccagaaattctagatttaggtgtcccaatccttggcgtctgctacggcatgcaactcttagcccagcactttgggggtaaggttgaagcttccaacaaaagagaatatgggggagccctcatttctcaaaccgaccaaaacggacaactcttccaagggctcgaccaggaagaagaagtttggatgagccatggtgacctagtcaaggaagtccctgatggcttccaagtcactgcccaaaacccccactgtccgattgcagccatgcaagacctgagtcgaaatatccatgctgtccagttccaccccgaagtgggccacaccaagcacggcaaggacatgctcaaacaatttacctttgacatttgtggctgttctggtaactgggacatgggtaaatttatcgacctagccatccaagagatcaaggatacagttggcgagaaaaaagtcctcctagccttgtctggcggggttgactcttcagtaaccggtgtcttattaaatgaagctatcggcgaccaactcacttgtatcttcgtggaccatggtctcctccgcaaaaatgaaggtgaccaagtcatggacagcttggtgggcaaatttggcttgaatatcatccgggtcaatgcccaagatcaattcctgtccaaactcgcgggtgtcacagatccagaacagaaacggaaaatcatcggtaatgaatttattgaagtctttaatgccgaagccgaaaaattagagggcattgaatttcttgcccaaggtactctctacaccgacattatcgaaagtggcacggaaacggcccaaaccatcaagtcccaccacaatgtaggtggtctccctgaagacctgcaatttgaactcattgaacccatgaaagctctcttcaaggatgaagtccgagctctgggtgaagagttgggcatgccagaatctctggtctggcgtcaacccttccctggcccaggacttgctatccgggtcctcggtgaagtgaccgaagacaagctcaaaattgtcagagaaagtgatgctatcttaagagaagaaattgccaaagctggcttagaccgggatatttggcagtacttcaccatcctgcctggcatgaaatcagtcggtgtcatgggcgacaaccggacttatgactacaccattggcatccgggcagttaattctgtagacgggatgacagctgattgggccaagattccttttgatgtcttggacaccattagtcgccggatagttaatgaaaccgaccacatcaaccgggtcgtttacgacatcacctctaagccacctgcaacagttgagtgggaataa

SEQ ID NO: 5748 - protein, 455 aa, Alloiococcus otitidis
MSVFDQNSFALDPEILDLGVPILGVCYGMQLLAQHFGGKVEASNKREYGGALISQTDQNGQLFQGLDQEEEVWMSHGDLVKEVPDGFQVTAQNPHCPIAAMQDLSRNIHAVQFHPEVGHTKHGKDMLKQFTFDICGCSGNWDMGKFIDLAIQEIKDTVGEKKVLLALSGGVDSSVTGVLLNEAIGDQLTCIFVDHGLLRKNEGDQVMDSLVGKFGLNIIRVNAQDQFLSKLAGVTDPEQKRKIIGNEFIEVFNAEAEKLEGIEFLAQGTLYTDIIESGTETAQTIKSHHNVGGLPEDLQFELIEPMKALFKDEVRALGEELGMPESLVWRQPFPGPGLAIRVLGEVTEDKLKIVRESDAILREEIAKAGLDRDIWQYFTILPGMKSVGVMGDNRTYDYTIGIRAVNSVDGMTADWAKIPFDVLDTISRRIVNETDHINRVVYDITSKPPATVEWE

SEQ ID NO: 5749 - DNA, 1572 bp, Alloiococcus otitidis; identical to SEQ ID NO: 5747
  CDS (16)..(1569)

SEQ ID NO: 5750 - protein, 518 aa, Alloiococcus otitidis
MNNIEQVKDLEQIVVLDYGSQYNQLITRRIREFGVYTELLSHKVTAEELKERNIKGIILSGGPMSVFDQNSFALDPEILDLGVPILGVCYGMQLLAQHFGGKVEASNKREYGGALISQTDQNGQLFQGLDQEEEVWMSHGDLVKEVPDGFQVTAQNPHCPIAAMQDLSRNIHAVQFHPEVGHTKHGKDMLKQFTFDICGCSGNWDMGKFIDLAIQEIKDTVGEKKVLLALSGGVDSSVTGVLLNEAIGDQLTCIFVDHGLLRKNEGDQVMDSLVGKFGLNIIRVNAQDQFLSKLAGVTDPEQKRKIIGNEFIEVFNAEAEKLEGIEFLAQGTLYTDIIESGTETAQTIKSHHNVGGLPEDLQFELIEPMKALFKDEVRALGEELGMPESLVWRQPFPGPGLAIRVLGEVTEDKLKIVRESDAILREEIAKAGLDRDIWQYFTILPGMKSVGVMGDNRTYDYTIGIRAVNSVDGMTADWAKIPFDVLDTISRRIVNETDHINRVVYDITSKPPATVEWE

SEQ ID NO: 5751 - DNA, 612 bp, Alloiococcus otitidis
  CDS (13)..(609)
aagggggggcttatggataaagaagaaataaaggcaagcattgctgaaataatttatcaagcttttaaagacaagatcaaatatttttggttttggactgataacaagaccaaggccttagatttgatccaaaagggactagatctcagccaggtttgcaccttgacgaatgaccaaggccagatagtggcttgtgcgaccatagaaacagctaacagtggactggccattgacctttcctacaaagattttaggaaaagcttcaaccccctaaccggcctggtccggcaaattgtctataccatttacaagggagctcaaaaaacggcccaagaagatgaagtttatgtcgacctggctgcagttagccctgccttccggagccagggttatggtggtcagctctttgaaaaactagaaaccctgtgccaagaaaagcaaaaaaacaagttatccttagatgtggtggactctaaccaggctgctaagtccttttatgagcgaataggctttgagcaagtcggctacgagcaaatgaacatcttgttcagacaattcaccaaaaaagctggctttgccggggtatacaccatgaccaaaaaagttaaataa

SEQ ID NO: 5752 - protein, 199 aa, Alloiococcus otitidis
MDKEEIKASIAEIIYQAFKDKIKYFWFWTDNKTKALDLIQKGLDLSQVCTLTNDQGQIVACATIETANSGLAIDLSYKDFRKSFNPLTGLVRQIVYTIYKGAQKTAQEDEVYVDLAAVSPAFRSQGYGGQLFEKLETLCQEKQKNKLSLDVVDSNQAAKSFYERIGFEQVGYEQMNILFRQFTKKAGFAGVYTMTKKVK

SEQ ID NO: 5753 - DNA, 738 bp, Alloiococcus otitidis
  CDS (37)..(735)
gtgaagacggaaaatatagaaggggaggaaggtcttatgccagtcaagagactagaagcatttgaagataattacatttgggtggtcgaagttggcgaccaggcccttgtggttgacccagggcaagcagacccggtcttggattatctagaaacaagtggtaaaaagttagctgccatcttgctcacccatgaccaccaagatcatgtggcaggtgtggaccagctaattgaagaaaacccaaacactccagtctatggtccccaagaaacggggtcctacaatagtcagaccgtccaagatggggaccaatttaacctcttgggcgactcatttacagtttacctaacggccggccatactccgggccatatttcctacctgtccggcgagcgactcttttgtggcgatgcccttttctcaggcggttgtggccgggtctttaccggagactaccaagcccagtttgacgccttgcagctatttaagacaatggaagacagtgtccaggtctatgccggccatgagtacaccgaaagcaatttagcctttgcccatagtgtgcaagcagacaattcggtcatctctaaggccttggaggaagttcgagaaaaacgggctaggggagaagctaccctgccctcaagcctggcctttgaaaaacaagtcaatgttttcctccaagcagaagacctggaaacttttaaaaacttacgtgagaagaaagaccaattttaa

SEQ ID NO: 5754 - protein, 233 aa, Alloiococcus otitidis
MPVKRLEAFEDNYIWVVEVGDQALVVDPGQADPVLDYLETSGKKLAAILLTHDHQDHVAGVDQLIEENPNTPVYGPQETGSYNSQTVQDGDQFNLLGDSFTVYLTAGHTPGHISYLSGERLFCGDALFSGGCGRVFTGDYQAQFDALQLFKTMEDSVQVYAGHEYTESNLAFAHSVQADNSVISKALEEVREKRARGEATLPSSLAFEKQVNVFLQAEDLETFKNLREKKDQF

SEQ ID NO: 5755 - DNA, 738 bp, Alloiococcus otitidis; identical to SEQ ID NO: 5753
  CDS (1)..(735)

SEQ ID NO: 5756 - protein, 245 aa, Alloiococcus otitidis
MKTENIEGEEGLMPVKRLEAFEDNYIWVVEVGDQALVVDPGQADPVLDYLETSGKKLAAILLTHDHQDHVAGVDQLIEENPNTPVYGPQETGSYNSQTVQDGDQFNLLGDSFTVYLTAGHTPGHISYLSGERLFCGDALFSGGCGRVFTGDYQAQFDALQLFKTMEDSVQVYAGHEYTESNLAFAHSVQADNSVISKALEEVREKRARGEATLPSSLAFEKQVNVFLQAEDLETFKNLREKKDQF

SEQ ID NO: 5757 - DNA, 1371 bp, Alloiococcus otitidis
  CDS (58)..(1368)
gtaaggggggatttggtgaaagaactagacttattggaagggaaaattttacccaccatgttacggttagcagctcctttaatggggactgcctttatccaactcttctatagtttgacggacatggcttggatcggtcggatttctactgaagctgtcgctgcggctggggtagggggggttttactttggctggcttcctcttttgtgatggtgccaagaataggactctctatcttaacagcccagttttacgggagaagggatcggaaccgggttaagctggctatcaacaatggggtttggatgggcctcattatggggatcctctacgggcttttcctttatttctttcgggaccccctgattcaattttaccgcttggaagggccggtcaatgccctggcggaggactacctggttattattgctatgggtatgccgattttcttcattaaccccgtcttgtctggggcctataacagtctagggaattcccggacaccctttcggattaatgccattggtttggtgactaatattataggagatcccctcttgatttttggcctgggtccctttccagaactggggattaggggggcggctctagcgactgtttcagcccaggtcattattctattctgttttatctttgttatcgttaaaagtcaggacttggtctaccacagtaaacttttaagctttacttaccgcaaggggatatttgctgacacctttaaattaggcctaccagctgccctccagtcagccttccacgcttccattagtattatcttaaaccgctatgtgtcggtttacggggctattgccctagcagttacttccatcgggtctaatatagagtccatttcctgggtgaccacggaaggttttgctaacgccattactgctttttcgggacagaattacggggcaggcttgtcctcaagaatggaagagatcttccacaccagtatgaaatcagttggaacaattgggattttggctacggtaattttgattacttttcgcaaccacttgtacaaactttttgtccctggtgacatggaggccattgccttgggggctagttacttgtttattttaggcctgagtcagttttttatgagcattgaaattgggtcaacaggctttttaaacggtctgggagagactcggctcccggctttgattaacactcttttgaacattagccggattcccttgtctttgattttgatgccaagtttgggaccggctggagtttggtgggccatgaccctctctagtgtggtcaagggtattttactctacattttagcccgctgtcgtttaaacaagctgggtctgtctaaaaaaatgttataa

SEQ ID NO: 5758 - protein, 437 aa, Alloiococcus otitidis
MLRLAAPLMGTAFIQLFYSLTDMAWIGRISTEAVAAAGVGGVLLWLASSFVMVPRIGLSILTAQFYGRRDRNRVKLAINNGVWMGLIMGILYGLFLYFFRDPLIQFYRLEGPVNALAEDYLVIIAMGMPIFFINPVLSGAYNSLGNSRTPFRINAIGLVTNIIGDPLLIFGLGPFPELGIRGAALATVSAQVIILFCFIFVIVKSQDLVYHSKLLSFTYRKGIFADTFKLGLPAALQSAFHASISIILNRYVSVYGAIALAVTSIGSNIESISWVTTEGFANAITAFSGQNYGAGLSSRMEEIFHTSMKSVGTIGILATVILITFRNHLYKLFVPGDMEAIALGASYLFILGLSQFFMSIEIGSTGFLNGLGETRLPALINTLLNISRIPLSLILMPSLGPAGVWWAMTLSSVVKGILLYILARCRLNKLGLSKKML

SEQ ID NO: 5759 - DNA, 1371 bp, Alloiococcus otitidis; identical to SEQ ID NO: 5757
  CDS (16)..(1368)

SEQ ID NO: 5760 - protein, 451 aa, Alloiococcus otitidis
MKELDLLEGKILPTMLRLAAPLMGTAFIQLFYSLTDMAWIGRISTEAVAAAGVGGVLLWLASSFVMVPRIGLSILTAQFYGRRDRNRVKLAINNGVWMGLIMGILYGLFLYFFRDPLIQFYRLEGPVNALAEDYLVIIAMGMPIFFINPVLSGAYNSLGNSRTPFRINAIGLVTNIIGDPLLIFGLGPFPELGIRGAALATVSAQVIILFCFIFVIVKSQDLVYHSKLLSFTYRKGIFADTFKLGLPAALQSAFHASISIILNRYVSVYGAIALAVTSIGSNIESISWVTTEGFANAITAFSGQNYGAGLSSRMEEIFHTSMKSVGTIGILATVILITFRNHLYKLFVPGDMEAIALGASYLFILGLSQFFMSIEIGSTGFLNGLGETRLPALINTLLNISRIPLSLILMPSLGPAGVWWAMTLSSVVKGILLYILARCRLNKLGLSKKML

SEQ ID NO: 5761 - DNA, 1371 bp, Alloiococcus otitidis; identical to SEQ ID NO: 5757
  CDS (13)..(1368)

SEQ ID NO: 5762 - protein, 452 aa, Alloiococcus otitidis
MVKELDLLEGKILPTMLRLAAPLMGTAFIQLFYSLTDMAWIGRISTEAVAAAGVGGVLLWLASSFVMVPRIGLSILTAQFYGRRDRNRVKLAINNGVWMGLIMGILYGLFLYFFRDPLIQFYRLEGPVNALAEDYLVIIAMGMPIFFINPVLSGAYNSLGNSRTPFRINAIGLVTNIIGDPLLIFGLGPFPELGIRGAALATVSAQVIILFCFIFVIVKSQDLVYHSKLLSFTYRKGIFADTFKLGLPAALQSAFHASISIILNRYVSVYGAIALAVTSIGSNIESISWVTTEGFANAITAFSGQNYGAGLSSRMEEIFHTSMKSVGTIGILATVILITFRNHLYKLFVPGDMEAIALGASYLFILGLSQFFMSIEIGSTGFLNGLGETRLPALINTLLNISRIPLSLILMPSLGPAGVWWAMTLSSVVKGILLYILARCRLNKLGLSKKML

SEQ ID NO: 5763 - DNA, 1023 bp, Alloiococcus otitidis
  CDS (733)..(1020)
agcaaattggaagttcttattggaagtggcttattgctcttatttttggcagcgttttcactatttacattttatgcgccggatggttcaaaggcaatgggagccctagcagatgcagcagttgcaacatttttagtcgaagccgttttttcagccttgttcggtgaaatttttgatgtcggatggttggcccaaatcgggaatattgctggcgaatcgtcaggtgcagcggcggcaggtttgactgccatggcacttggggtttcgcctgtttacgcttttatggtttcgcttcctctctatggccagtccatcttgcctggctttatagctggttaccttatagcttttttgatccgtttgttggaacgtaaaataccgggtggttttgacatgattgtcatcttgttcattggtcctgttttaacctatgctttcagcatgtggtcttctggtccaatcgatggcctcatgatgcaaattggtgaaaccatcaacatagcagctgaaacttcaccgattatcatgggcttcttaatcggaggtctattgacagttgtttccaccgcaccgatttcttctatggctgtgtcagccatgatcaatatgacggggggacccatggccattgcaggtttgtccatctttgggacagctgcttgtaactaccttatctttagacggctaaaaattggagaccaatccgatgcgattgctgttactgttgaacccttgacagctgctgacttggtctcagctaaccctatcccgatttataccattaatatgatcagtgggggattgatcgggattatgatttccttggccggtttaattaacaataccccagggactgcatctgttgttccaggtattatagccgcctttgcttggaacccaccaggacaagttgttttatacagtgtcttgggtcttattatcggggctgttgtcggtatagtcggatcttgggcctttaaaaattacaagattaccaaccgggaagatatggttcaagactaa

SEQ ID NO: 5764 - protein, 96 aa, Alloiococcus otitidis
MTAADLVSANPIPIYTINMISGGLIGIMISLAGLINNTPGTASVVPGIIAAFAWNPPGQVVLYSVLGLIIGAVVGIVGSWAFKNYKITNREDMVQD

SEQ ID NO: 5765 - DNA, 1023 bp, Alloiococcus otitidis; identical to SEQ ID NO: 5763
  CDS (550)..(1020)

SEQ ID NO: 5766 - protein, 157 aa, Alloiococcus otitidis
MTVVSTAPISSMAVSAMINMTGGPMAIAGLSIFGTAACNYLIFRRLKIGDQSDAIAVTVEPLTAADLVSANPIPIYTINMISGGLIGIMISLAGLINNTPGTASVVPGIIAAFAWNPPGQVVLYSVLGLIIGAVVGIVGSWAFKNYKITNREDMVQD

SEQ ID NO: 5767 - DNA, 1023 bp, Alloiococcus otitidis; identical to SEQ ID NO: 5763
  CDS (187)..(1020)

SEQ ID NO: 5768 - protein, 278 aa, Alloiococcus otitidis
MAQIGNIAGESSGAAAAGLTAMALGVSPVYAFMVSLPLYGQSILPGFIAGYLIAFLIRLLERKIPGGFDMIVILFIGPVLTYAFSMWSSGPIDGLMMQIGETINIAAETSPIIMGFLIGGLLTVVSTAPISSMAVSAMINMTGGPMAIAGLSIFGTAACNYLIFRRLKIGDQSDAIAVTVEPLTAADLVSANPIPIYTINMISGGLIGIMISLAGLINNTPGTASVVPGIIAAFAWNPPGQVVLYSVLGLIIGAVVGIVGSWAFKNYKITNREDMVQD

SEQ ID NO: 5769 - DNA, 1023 bp, Alloiococcus otitidis; identical to SEQ ID NO: 5763
  CDS (97)..(1020)

SEQ ID NO: 5770 - protein, 308 aa, Alloiococcus otitidis
MGALADAAVATFLVEAVFSALFGEIFDVGWLAQIGNIAGESSGAAAAGLTAMALGVSPVYAFMVSLPLYGQSILPGFIAGYLIAFLIRLLERKIPGGFDMIVILFIGPVLTYAFSMWSSGPIDGLMMQIGETINIAAETSPIIMGFLIGGLLTVVSTAPISSMAVSAMINMTGGPMAIAGLSIFGTAACNYLIFRRLKIGDQSDAIAVTVEPLTAADLVSANPIPIYTINMISGGLIGIMISLAGLINNTPGTASVVPGIIAAFAWNPPGQVVLYSVLGLIIGAVVGIVGSWAFKNYKITNREDMVQD

SEQ ID NO: 5771 - DNA, 1023 bp, Alloiococcus otitidis; identical to SEQ ID NO: 5763
  CDS (7)..(1020)

SEQ ID NO: 5772 - protein, 338 aa, Alloiococcus otitidis
MEVLIGSGLLLLFLAAFSLFTFYAPDGSKAMGALADAAVATFLVEAVFSALFGEIFDVGWLAQIGNIAGESSGAAAAGLTAMALGVSPVYAFMVSLPLYGQSILPGFIAGYLIAFLIRLLERKIPGGFDMIVILFIGPVLTYAFSMWSSGPIDGLMMQIGETINIAAETSPIIMGFLIGGLLTVVSTAPISSMAVSAMINMTGGPMAIAGLSIFGTAACNYLIFRRLKIGDQSDAIAVTVEPLTAADLVSANPIPIYTINMISGGLIGIMISLAGLINNTPGTASVVPGIIAAFAWNPPGQVVLYSVLGLIIGAVVGIVGSWAFKNYKITNREDMVQD

SEQ ID NO: 5773 - DNA, 411 bp, Alloiococcus otitidis
  CDS (76)..(408)
cgggttagggctactaactcgccatgcgggccatctttaagaagattgactctagactcaagaggaggcaataaagtggatcatttgactgataaggttaatcaatttcgggatgaaagagactggcgccagttccataatgaaaaagaccttgccatctcaatttccttagaagcttcggaattgctagagattttccagtggcagtccagccaggaagctattgatcaaaatttaacacacatcaaagaagagttagctgatgtcctcatttatgccctaatgtttgcggataatttagacttagacattgatgaaatcatcagcgataaattagctaaaaacgcacaaaaatacccaattagtaaaagtaaggggaaccggaaaaagtataccgaatgggaaagatag

SEQ ID NO: 5774 - protein, 111 aa, Alloiococcus otitidis
MDHLTDKVNQFRDERDWRQFHNEKDLAISISLEASELLEIFQWQSSQEAIDQNLTHIKEELADVLIYALMFADNLDLDIDEIISDKLAKNAQKYPISKSKGNRKKYTEWER

SEQ ID NO: 5775 - DNA, 411 bp, Alloiococcus otitidis; identical to SEQ ID NO: 5773
  CDS (46)..(408)

SEQ ID NO: 5776 - protein, 121 aa, Alloiococcus otitidis
MTLDSRGGNKVDHLTDKVNQFRDERDWRQFHNEKDLAISISLEASELLEIFQWQSSQEAIDQNLTHIKEELADVLIYALMFADNLDLDIDEIISDKLAKNAQKYPISKSKGNRKKYTEWER

SEQ ID NO: 5777 - DNA, 1383 bp, Alloiococcus otitidis
  CDS (13)..(1380)
ggaggaaaaattatggcttacaagacaatttatccttatacaaatgaagttctcaaaagctatgatgatacgactgaccaggaaatcgaaacagctcttgaccaaggtcacgccctttacaagaagtggcgccaagaagaccaattgcaagagcgaaaacaacacctactcaaactatcccaaatccttttggacaatgtggaccattacgctgaagttctcaccaaggacatgggtaaactcttgtccgaagccaaggatgaggtcaaattaaccgctaaaattgcccactactatgccgaaaaagcagaagacttcttgcagcctaccccactggaaaccaatgcgggagatgcctactatcttaaacaagcaaccggtattatcatggcagttgagccttggaacttcccttattaccaagttatccgggtctttgcccctaactacatggttgggaaccccatgatcttaaaacacgcttccatctgccctggttctgcccaagcttttgaagacttaaccaaggaagcaggtatcccagaaggtggctttaccaatatctttgcaagctatgaccaggtcaatgagattattgcggatgaccgagtttcaggggtctgcttaactgggtcggaacgcggtggttctgaagttgcccaacaagctggtaaagagctgaaaaaatcgacccttgagttaggtgggaatgaccccttcatcgtcctagaagatgctgactggggcaaggttgaagacttacttccctctgcccgcttgtccaatgctggtcaagtttgtacctcttccaaacgctttatcgttttagaaaaagattatgacaaatttatcgacctcttgcagaaaagctttgaagatgtcgtttggggcgacccaatggatgaaaaaacgaccctggctcccctctcatctgccaaagccaaagaagacgttcttgaccaaatcaaaacagcagtggaccacggggctaaagtcgtttatggcaatgaaagcatcgaccaccccggaaactttgtccagcaaaccatcctaaccgatatcgacaaggacaaccccatttacaaccaagaaatattcggtccggttgccattgtccacaaggttaaagacgaagcggaagctattgagctggccaatgactcttcatatggtttagggaacaccattatgagtgaagataccgaccatgccaaagaagtggctagccagattgaaaccggcatgtcctttatcaactcttcttgggtttcactaccagaactcccattcggtggagtgaaaaactcaggctacggccgggaactctccgaacttggctttgatgcctttgtcaacgaacacttggttttagtcgctaactaa

SEQ ID NO: 5778 - protein, 456 aa, Alloiococcus otitidis
MAYKTIYPYTNEVLKSYDDTTDQEIETALDQGHALYKKWRQEDQLQERKQHLLKLSQILLDNVDHYAEVLTKDMGKLLSEAKDEVKLTAKIAHYYAEKAEDFLQPTPLETNAGDAYYLKQATGIIMAVEPWNFPYYQVIRVFAPNYMVGNPMILKHASICPGSAQAFEDLTKEAGIPEGGFTNIFASYDQVNEIIADDRVSGVCLTGSERGGSEVAQQAGKELKKSTLELGGNDPFIVLEDADWGKVEDLLPSARLSNAGQVCTSSKRFIVLEKDYDKFIDLLQKSFEDVVWGDPMDEKTTLAPLSSAKAKEDVLDQIKTAVDHGAKVVYGNESIDHPGNFVQQTILTDIDKDNPIYNQEIFGPVAIVHKVKDEAEAIELANDSSYGLGNTIMSEDTDHAKEVASQIETGMSFINSSWVSLPELPFGGVKNSGYGRELSELGFDAFVNEHLVLVAN

SEQ ID NO: 5779 - DNA, 882 bp, Alloiococcus otitidis
  CDS (55)..(879)
agtcttcccctcacttgtggtaaactggagaaaaagacgaggagttttgcatgcatgaaatttatttcttggaatattgattccctgaacgctgccttaaccagtgattccaacagggcccaaatgtcccgccaggttttagaaactatccaggactaccaaccggatgtcctggccattcaagagaccaagctgtctgctaagggaccgacgaaaaagcacgccaagcgtctagaagaatggtttccaaactatgactatgcctgggttagttcggttgaaccagccagaaaaggttatgccggtaatatggtcttctacaaaaaagaccttagtcctgaagtaacctacccaaggattgatgctccggagcccatggacagtgaaggccggatgattaccctggaattcgacaacttctactttacccaagtctacacccctaatgctggatcgcaattagcccggctcggtgaacgtcaagagtgggacaagcaatatgctaactacctggctggcttggatgctgacaaaccagttattgcggctggggactttaatgtggcccaccgagaaattgacctggcccacccagagaacaaccactactcggctggttttacagatgaagaacgggaaggctttagtcacttgcttagccggggctttaccgacagcttccgccatgtcaatggagacgttgagggtgtttattcctggtgggcgcagcgggtcaagacaagtaaggaaaacaattcaggctggagaattgactacttcctcaccagtgaccgtttaagtgaccaggtagaaaaatccgaaatggtcgactcaggtccccgccaagatcacaccccgatttatctagaagtcaagttttaa

SEQ ID NO: 5780 - protein, 275 aa, Alloiococcus otitidis
MKFISWNIDSLNAALTSDSNRAQMSRQVLETIQDYQPDVLAIQETKLSAKGPTKKHAKRLEEWFPNYDYAWVSSVEPARKGYAGNMVFYKKDLSPEVTYPRIDAPEPMDSEGRMITLEFDNFYFTQVYTPNAGSQLARLGERQEWDKQYANYLAGLDADKPVIAAGDFNVAHREIDLAHPENNHYSAGFTDEEREGFSHLLSRGFTDSFRHVNGDVEGVYSWWAQRVKTSKENNSGWRIDYFLTSDRLSDQVEKSEMVDSGPRQDHTPIYLEVKF

SEQ ID NO: 5781 - DNA, 483 bp, Alloiococcus otitidis
  CDS (115)..(480)
ctagaagcggtaaaaatgactactaagaaactcagtcgtctggctatttttatcgccttgtcctttgtcttgtccacagtgattgtcttccccaatatggccccagcccaacacatgatgaatgttgtcggggccatggtcctaggtccagtttataatgccattgctgcctttgtttctggcctcttccggatggccttgtctgggagagcattcattgcaacttcaggatgggtaggagcccttttgtcaggcttggtctataagcacactaaaaatatcttatggactggattaagtgaagtggtggggtcgggcattctctcagcctttgtctattattttccgatgaaatttatttatggcttggacctgcctaatgccggctactatatccctttcttccttccctctgccctggtaggagctattattggcgtacttgtcttagcagccttaaggaaagttgatgcctttcattag

SEQ ID NO: 5782 - protein, 122 aa, Alloiococcus otitidis
MMNVVGAMVLGPVYNAIAAFVSGLFRMALSGRAFIATSGWVGALLSGLVYKHTKNILWTGLSEVVGSGILSAFVYYFPMKFIYGLDLPNAGYYIPFFLPSALVGAIIGVLVLAALRKVDAFH

SEQ ID NO: 5783 - DNA, 483 bp, Alloiococcus otitidis; identical to SEQ ID NO: 5781
  CDS (16)..(480)

SEQ ID NO: 5784 - protein, 155 aa, Alloiococcus otitidis
MTTKKLSRLAIFIALSFVLSTVIVFPNMAPAQHMMNVVGAMVLGPVYNAIAAFVSGLFRMALSGRAFIATSGWVGALLSGLVYKHTKNILWTGLSEVVGSGILSAFVYYFPMKFIYGLDLPNAGYYIPFFLPSALVGAIIGVLVLAALRKVDAFH

SEQ ID NO: 5785 - DNA, 999 bp, Alloiococcus otitidis
  CDS (172)..(996)
agaccctggcggatatcagccccatcccggttgtcgttgggggcggggtcaaggccaaagacctggccgacctcaaacaaactggggtggctggctactttgtcgtgtcagctattgctggggctcatgaccccggccaggcagcccgagaactcattacaacttggcaaaatgcgaaaaaatgaacggaggattataatgaagaaagctctaaccatagcaggatctgactcttcaggaggtgcaggcatccaagctgacttgaaaaccttcctggcccaagatgtttatggcatgtctgctatcacctcaatcaccgcacaaaatacccagggcgtccaagaggtggaagtcttaagtgaagaccttttggcagcccagttggactcaattttccaagatatccgccccgatgctgtcaaaattggtatggtaggcaatagtgccgctatcgatgcgattgtggcgaaactaaaagaatataaagccgaaaatattgtcttggatcccgttatggtagcgacttcgggatctaacttgtttaaatccgatgatgcttctagctatgatgctctcttccgcttggctaccgtcctgacacccaatgtctatgaaagcgggcaaatctccggcaaggaaattaagaccttaaaagatctggaagaagctgcacgcgacatttcagacaagttccaaacagcagtcctagccaagagtggcgacttaaaggaccaggaagcagatgacatcttagcctaccaaggtcaggtggaaactttccatggccaacgaattgacaaccccaatgtccatggcagtggctgtaccttgtcttctgccattgccgctaacctcgccaagggacatgacttatctaccagtgtccaaaatgctaaggactacatcaccggagccatccaacaaaatctcgacctgggtcagggcaggggtccactagaccatggttatttagctagaagcggtaaaaatgactactaa

SEQ ID NO: 5786 - protein, 275 aa, Alloiococcus otitidis
MRKNERRIIMKKALTIAGSDSSGGAGIQADLKTFLAQDVYGMSAITSITAQNTQGVQEVEVLSEDLLAAQLDSIFQDIRPDAVKIGMVGNSAAIDAIVAKLKEYKAENIVLDPVMVATSGSNLFKSDDASSYDALFRLATVLTPNVYESGQISGKEIKTLKDLEEAARDISDKFQTAVLAKSGDLKDQEADDILAYQGQVETFHGQRIDNPNVHGSGCTLSSAIAANLAKGHDLSTSVQNAKDYITGAIQQNLDLGQGRGPLDHGYLARSGKNDY

SEQ ID NO: 5787 - DNA, 999 bp, Alloiococcus otitidis; identical to SEQ ID NO: 5785
  CDS (127)..(996)

SEQ ID NO: 5788 - protein, 290 aa, Alloiococcus otitidis
MTPARQPENSLQLGKMRKNERRIIMKKALTIAGSDSSGGAGIQADLKTFLAQDVYGMSAITSITAQNTQGVQEVEVLSEDLLAAQLDSIFQDIRPDAVKIGMVGNSAAIDAIVAKLKEYKAENIVLDPVMVATSGSNLFKSDDASSYDALFRLATVLTPNVYESGQISGKEIKTLKDLEEAARDISDKFQTAVLAKSGDLKDQEADDILAYQGQVETFHGQRIDNPNVHGSGCTLSSAIAANLAKGHDLSTSVQNAKDYITGAIQQNLDLGQGRGPLDHGYLARSGKNDY

SEQ ID NO: 5789 - DNA, 999 bp, Alloiococcus otitidis; identical to SEQ ID NO: 5785
  CDS (115)..(996)

SEQ ID NO: 5790 - protein, 294 aa, Alloiococcus otitidis
MLGLMTPARQPENSLQLGKMRKNERRIIMKKALTIAGSDSSGGAGIQADLKTFLAQDVYGMSAITSITAQNTQGVQEVEVLSEDLLAAQLDSIFQDIRPDAVKIGMVGNSAAIDAIVAKLKEYKAENIVLDPVMVATSGSNLFKSDDASSYDALFRLATVLTPNVYESGQISGKEIKTLKDLEEAARDISDKFQTAVLAKSGDLKDQEADDILAYQGQVETFHGQRIDNPNVHGSGCTLSSAIAANLAKGHDLSTSVQNAKDYITGAIQQNLDLGQGRGPLDHGYLARSGKNDY

SEQ ID NO: 5791 - DNA, 999 bp, Alloiococcus otitidis; identical to SEQ ID NO: 5785
  CDS (31)..(996)

SEQ ID NO: 5792 - protein, 322 aa, Alloiococcus otitidis
MSLGAGSRPKTWPTSNKLGWLATLSCQLLLGLMTPARQPENSLQLGKMRKNERRIIMKKALTIAGSDSSGGAGIQADLKTFLAQDVYGMSAITSITAQNTQGVQEVEVLSEDLLAAQLDSIFQDIRPDAVKIGMVGNSAAIDAIVAKLKEYKAENIVLDPVMVATSGSNLFKSDDASSYDALFRLATVLTPNVYESGQISGKEIKTLKDLEEAARDISDKFQTAVLAKSGDLKDQEADDILAYQGQVETFHGQRIDNPNVHGSGCTLSSAIAANLAKGHDLSTSVQNAKDYITGAIQQNLDLGQGRGPLDHGYLARSGKNDY

SEQ ID NO: 5793 - DNA, 708 bp, Alloiococcus otitidis
  CDS (82)..(705)
atgactgactttaatcctgaccacttgacccactactttattgttgggccacaaaacaccctgggccgggaccccctccaggtgattgaagcggccattgaagccggcatgactatgatccaaatccgggacaaggaaggggaggctaaggatattattgacctgaccaacaagacggctgacctgatccaaaaaatgggcaaggaagaagaggttagcttgcttgtcaatgaccgtttggatattgttttagcctgccgcgacttaggctacaaggttgacggcatccatgtgggtcaagacgatataccggtgtcggtctgccgtaagtacctgggacctaacagcattgttggcttatcagcagctacccaccaattgatcgattacgtcaagcaaacggacaccaaagacattgattactttggggcaggccccttgcatgagacagcaaccaagccggatgctggttatgacaaaggacaaaaaggccccattcagctccgaaacctagatgaattgaagaccctggcggatatcagccccatcccggttgtcgttgggggcggggtcaaggccaaagacctggccgacctcaaacaaactggggtggctggctactttgtcgtgtcagctattgctggggctcatgaccccggccaggcagcccgagaactcattacaacttggcaaaatgcgaaaaaatga

SEQ ID NO: 5794 - protein, 208 aa, Alloiococcus otitidis
MIEAAIEAGMTMIQIRDKEGEAKDIIDLTNKTADLIQKMGKEEEVSLLVNDRLDIVLACRDLGYKVDGIHVGQDDIPVSVCRKYLGPNSIVGLSAATHQLIDYVKQTDTKDIDYFGAGPLHETATKPDAGYDKGQKGPIQLRNLDELKTLADISPIPVVVGGGVKAKDLADLKQTGVAGYFVVSAIAGAHDPGQAARELITTWQNAKK

SEQ ID NO: 5795 - DNA, 708 bp, Alloiococcus otitidis; identical to SEQ ID NO: 5793
  CDS (1)..(705)

SEQ ID NO: 5796 - protein, 235 aa, Alloiococcus otitidis
MTDFNPDHLTHYFIVGPQNTLGRDPLQVIEAAIEAGMTMIQIRDKEGEAKDIIDLTNKTADLIQKMGKEEEVSLLVNDRLDIVLACRDLGYKVDGIHVGQDDIPVSVCRKYLGPNSIVGLSAATHQLIDYVKQTDTKDIDYFGAGPLHETATKPDAGYDKGQKGPIQLRNLDELKTLADISPIPVVVGGGVKAKDLADLKQTGVAGYFVVSAIAGAHDPGQAARELITTWQNAKK

SEQ ID NO: 5797 - DNA, 867 bp, Alloiococcus otitidis
  CDS (625)..(864)
aataaagtgagccttagccccataatatgtatgaggagtgatccagtgctagatcaaatgcaaaagactgtggcagaggcaagagaccatggtccttttgttcctagtatcactaatattgtcactgtaaatcctgttgttaacgctcagataggagtgggcgggtcaccagcagtcttttaccaggcagaagaaggagagagttttgcaccagagtgtgacgccctctacattaacctgggtacactcatcaaggaccatgagacggcggtgccagctaccatcaaggcccttgaccaagccggtaagccttggttacttgacccagtcggtattggcaagggaaggatacaccagaagttgatttcctttatcaaggactacccgccgaccatcattaagggcaatgcgactgaaattattaagttagcttctgcttgggggcttaaagaccaggcagaccaaacctttatcggggttgacagtaaggatagtgtccaagctgccaagtcactggctgtcaagctagcccgctttacaaagcaggtggtagtcatctcaggcccgaaagattttgtgactgatggtaaccatcactattcgctcaagggcgggtcagccttaatggggcagatcactggagctggttgcatgctggctggtgtgatggcagtttacctgggagtagctcaacccctaacagcagcccttacagcttgcactttgtttaaccaggccagtcaagcagctgcccagtcagcccaagaaccggcatctttccaaacagcgttcttagacttgctttatagcctttccaaagaaggcaaattggaagccaattatgaggaggatgacttaaatgactga

SEQ ID NO: 5798 - protein, 80 aa, Alloiococcus otitidis
MGQITGAGCMLAGVMAVYLGVAQPLTAALTACTLFNQASQAAAQSAQEPASFQTAFLDLLYSLSKEGKLEANYEEDDLND

SEQ ID NO: 5799 - DNA, 867 bp, Alloiococcus otitidis; identical to SEQ ID NO: 5797
  CDS (31)..(864)

SEQ ID NO: 5800 - protein, 278 aa, Alloiococcus otitidis
MRSDPVLDQMQKTVAEARDHGPFVPSITNIVTVNPVVNAQIGVGGSPAVFYQAEEGESFAPECDALYINLGTLIKDHETAVPATIKALDQAGKPWLLDPVGIGKGRIHQKLISFIKDYPPTIIKGNATEIIKLASAWGLKDQADQTFIGVDSKDSVQAAKSLAVKLARFTKQVVVISGPKDFVTDGNHHYSLKGGSALMGQITGAGCMLAGVMAVYLGVAQPLTAALTACTLFNQASQAAAQSAQEPASFQTAFLDLLYSLSKEGKLEANYEEDDLND

SEQ ID NO: 5801 - DNA, 867 bp, Alloiococcus otitidis; identical to SEQ ID NO: 5797
  CDS (7)..(864)

SEQ ID NO: 5802 - protein, 286 aa, Alloiococcus otitidis
MSLSPIICMRSDPVLDQMQKTVAEARDHGPFVPSITNIVTVNPVVNAQIGVGGSPAVFYQAEEGESFAPECDALYINLGTLIKDHETAVPATIKALDQAGKPWLLDPVGIGKGRIHQKLISFIKDYPPTIIKGNATEIIKLASAWGLKDQADQTFIGVDSKDSVQAAKSLAVKLARFTKQVVVISGPKDFVTDGNHHYSLKGGSALMGQITGAGCMLAGVMAVYLGVAQPLTAALTACTLFNQASQAAAQSAQEPASFQTAFLDLLYSLSKEGKLEANYEEDDLND

SEQ ID NO: 5803 - DNA, 528 bp, Alloiococcus otitidis
  CDS (1)..(525)
atgcaggtaaacaaagacgccctccatttggtggaagtgacacccatattccaacaacaagtcataacttttcgggattcctttgggccaggccctattcatggtggctttggtttaaaagaagcaaacaccttcaaagactggtatcactttgtccaacaatgtaaaacagaagctactgttccgaaaggcatggtaccggcttccagctatcttcttttgaaccaccgggaaatggtggggattactaaccttcgccaccgattaaatgagggattgctgtatgatggcggtcatatcggctacagcattagtccttcataccggggaaggggttatggcaaaaagatcctctccctttgcttaggccaggctagggctatcggactaacttcagtcttactgacagtcaatcctgacaatatggccagtataagggtcgtcaaggctaatggtggaagactggaaaaccaagtgaaagcaaggtcaggcaaacgggttaaccggtattggattgacttgtcataa

SEQ ID NO: 5804 - protein, 175 aa, Alloiococcus otitidis
MQVNKDALHLVEVTPIFQQQVITFRDSFGPGPIHGGFGLKEANTFKDWYHFVQQCKTEATVPKGMVPASSYLLLNHREMVGITNLRHRLNEGLLYDGGHIGYSISPSYRGRGYGKKILSLCLGQARAIGLTSVLLTVNPDNMASIRVVKANGGRLENQVKARSGKRVNRYWIDLS

SEQ ID NO: 5805 - DNA, 903 bp, Alloiococcus otitidis
  CDS (148)..(900)
aagctagcactctttgaaaagagtgctagcttttatgctcattctagccattatgacttgacttctgacttcccctcttttacattaagggtattcttttgcaggtatttgagtaaatcggataaaggagaaagcatgaagaatcgaatgattttagtacatggcacttggggaaccagtcaagattggcagtatattcaagatgacttggcagggcttggctttgatatattagccctcaacctgctccaccatgacctgccctataaagaagcaggtgagatggttaaggacttgagcttacaagcttatgctgaccaggttcaaaaactggtggaaaattgcccccaaccccccattttagttggtcattccttgggttgtttggtggtccaaatggtagctcaaaagactgacttggccggcctcatcttactggggccggctcccaatgcagatatcttcgccttttacccttctatggtgctagccttcttgcctcattttttacgctggggcttttggcgcaaggccattccaccatataagcatgcggttcgtttggctcatgaccaacatgacttccaacatgttgaagcagccttagaccattttgttccagactcaggcaaggcgtatacccaagtcgctttaccctttttagatgcagaagagacaacagccattgactataagaaggtaagctgtcccgtccttattattgtcggccaacacgacaagttgacagtgccggctattgccagggcaattggcgaaaaatatggcagtcaggctactgtctacctgtctggggaggctgaccatatgaccattggccctaactttaaagaccagaccacttttttaatcaagcggtggttgaaccatgaagaggtggtttaa

SEQ ID NO: 5806 - protein, 251 aa, Alloiococcus otitidis
MILVHGTWGTSQDWQYIQDDLAGLGFDILALNLLHHDLPYKEAGEMVKDLSLQAYADQVQKLVENCPQPPILVGHSLGCLVVQMVAQKTDLAGLILLGPAPNADIFAFYPSMVLAFLPHFLRWGFWRKAIPPYKHAVRLAHDQHDFQHVEAALDHFVPDSGKAYTQVALPFLDAEETTAIDYKKVSCPVLIIVGQHDKLTVPAIARAIGEKYGSQATVYLSGEADHMTIGPNFKDQTTFLIKRWLNHEEVV

SEQ ID NO: 5807 - DNA, 903 bp, Alloiococcus otitidis; identical to SEQ ID NO: 5805
  CDS (136)..(900)

SEQ ID NO: 5808 - protein, 255 aa, Alloiococcus otitidis
MKNRMILVHGTWGTSQDWQYIQDDLAGLGFDILALNLLHHDLPYKEAGEMVKDLSLQAYADQVQKLVENCPQPPILVGHSLGCLVVQMVAQKTDLAGLILLGPAPNADIFAFYPSMVLAFLPHFLRWGFWRKAIPPYKHAVRLAHDQHDFQHVEAALDHFVPDSGKAYTQVALPFLDAEETTAIDYKKVSCPVLIIVGQHDKLTVPAIARAIGEKYGSQATVYLSGEADHMTIGPNFKDQTTFLIKRWLNHEEVV

SEQ ID NO: 5809 - DNA, 903 bp, Alloiococcus otitidis; identical to SEQ ID NO: 5805
  CDS (58)..(900)

SEQ ID NO: 5810 - protein, 281 aa, Alloiococcus otitidis
MTSDFPSFTLRVFFCRYLSKSDKGESMKNRMILVHGTWGTSQDWQYIQDDLAGLGFDILALNLLHHDLPYKEAGEMVKDLSLQAYADQVQKLVENCPQPPILVGHSLGCLVVQMVAQKTDLAGLILLGPAPNADIFAFYPSMVLAFLPHFLRWGFWRKAIPPYKHAVRLAHDQHDFQHVEAALDHFVPDSGKAYTQVALPFLDAEETTAIDYKKVSCPVLIIVGQHDKLTVPAIARAIGEKYGSQATVYLSGEADHMTIGPNFKDQTTFLIKRWLNHEEVV

SEQ ID NO: 5811 - DNA, 396 bp, Alloiococcus otitidis
  CDS (25)..(393)
aagagattaattcaattaccactgatgaagcttttaaagatgaagtttgttgcgcaatttttgttcataaaccctttatccaagaaaatccagttatcactaaaaattgttacgggcatctataaggccaatgattgggctgaagaagatacaggaagttatgtagagtttctttatgaccacgacttattatctggtgatcaacaagatggttttgaatttattgattctttaaactataaggcatctgaacaacaattagaggatactattaaagaaattattgatgactatatcgaattgggcgttctagaagagggtatcgatcccgaagaaacccttaactatatctgggcaccgactggcataggaattgaagatgttaatggccagtaa

SEQ ID NO: 5812 - protein, 123 aa, Alloiococcus otitidis
MKLLKMKFVAQFLFINPLSKKIQLSLKIVTGIYKANDWAEEDTGSYVEFLYDHDLLSGDQQDGFEFIDSLNYKASEQQLEDTIKEIIDDYIELGVLEEGIDPEETLNYIWAPTGIGIEDVNGQ

SEQ ID NO: 5813 - DNA, 651 bp, Alloiococcus otitidis
  CDS (109)..(648)
cccaaattagctagtaatttatcaagttgtatcaaaaatccaagccttaatggttgtactgctcccatcaatgtggctaaggaaaaaggatatttcgaagaagaaggtttggacgttgaactagtgcaaagtcaaaatgagacaattaatgctgtcgggactggtcaagttgtcttaggtgctggacatattaccagtagtttgattccaattattaatggtgttgatgcccaataccttggactgatgaatacaggatgcaagggactttatgtggcaggtgattcagatcttgaatcagctggagagatggatgagatgactatcggtatccatggtggcatgggcgagtctgaccacaatattgctttacgctttctccaagaagaaggggctgaccctgaatctgttcaatttactacttcagacgtagcagcaaccacagaagcgatcaaaagtggtgagttagatggggcgatttacacagaaaactgtgctgccccaatcgttgaagatgggtctttgaaagagattaattcaattaccactgatgaagcttttaaagatgaagtttgttgcgcaatttttgttcataaaccctttatccaagaaaatccagttatcactaaaaattgttacgggcatctataa

SEQ ID NO: 5814 - protein, 180 aa, Alloiococcus otitidis
MDVELVQSQNETINAVGTGQVVLGAGHITSSLIPIINGVDAQYLGLMNTGCKGLYVAGDSDLESAGEMDEMTIGIHGGMGESDHNIALRFLQEEGADPESVQFTTSDVAATTEAIKSGELDGAIYTENCAAPIVEDGSLKEINSITTDEAFKDEVCCAIFVHKPFIQENPVITKNCYGHL

SEQ ID NO: 5815 - DNA, 651 bp, Alloiococcus otitidis; identical to SEQ ID NO: 5813
  CDS (73)..(648)

SEQ ID NO: 5816 - protein, 192 aa, Alloiococcus otitidis
MAKEKGYFEEEGLDVELVQSQNETINAVGTGQVVLGAGHITSSLIPIINGVDAQYLGLMNTGCKGLYVAGDSDLESAGEMDEMTIGIHGGMGESDHNIALRFLQEEGADPESVQFTTSDVAATTEAIKSGELDGAIYTENCAAPIVEDGSLKEINSITTDEAFKDEVCCAIFVHKPFIQENPVITKNCYGHL

SEQ ID NO: 5817 - DNA, 1386 bp, Alloiococcus otitidis
  CDS (37)..(1383)
ataaaaatgaaagaccaactccggcaactccctaaaatggatgacttactagcagatgaggccattcaaaaatggcaggaaacttttactgaagacttgatcaaggcagtctgcaaccaagttctagactctcttcgccaggccattctggacggccagtcaccatccttgtccctagaccgggttattcgcttagtggatgaagaattaactgaccgggcttctttatcctttgaccgggttgtcaatgccacagggacagtgctccataccaatttaggccgggccattttaagcaagcctagtttagaaagtttaaaggccaaagctgaaagctacagcaacttggagtacaatcttcaggcaggtcgaagaggctcccgctacagccatgtcgaagacctcctttgtgaactgaccggggctgaggcggctttagttgttaacaataatgcagcgggtgttcttttgctgctcactgccctcctttcaaatcaggaagttttggtttcccggggtcaactcgtggaaattgggggctcctttaggattccagatattatttctagtgtgggggcccgtttaaaagaagtcggagcgaccaacaagacccacctaaaagattatgaagctgctatcggggaagagaccggggctattttaaaagtccacaccagtaactaccgggttatcggattttctgaggcgcccagtgaccaagatttagttgacttggctcaccgcaagcaattacccatttttaacgacttggggtctggtctcttgcttgacctgcaacctttaggcttgccgtacgagccaactgttcaagaaagcatccaggcgggttacgatgtcgtgacctttagcggggacaaactcttgggtggcccccaagcgggtattttgctgggcaaggccaagtacattaaacaattaaaaggccaccccctcttaagagccctgagggtggataagttcactatagctgctttagaaatgactctacaggcctaccgcaagcctcagcaagcctttgaaaccattcctagcctccagcttttaagccagagccctgaccagttacaagcaaaggcagaggccttgaaagaaaaaattgaagggataaatggcccttatactgttgaagtagtccctggccagtctcaagttggtggcggtgcctacccggaagctaaactagctaccagcttggtggaaataagccaccaaactatgacggagagccaattggaacgggccctccgcttgtctcaagaccatatcattgcccgaattgctgatggcaaggtccaagttgatgtccggactctgcttgaaggcgaccaggaccggattgcccgtgtcctagcccaaattagctag

SEQ ID NO: 5818 - protein, 449 aa, Alloiococcus otitidis
MDDLLADEAIQKWQETFTEDLIKAVCNQVLDSLRQAILDGQSPSLSLDRVIRLVDEELTDRASLSFDRVVNATGTVLHTNLGRAILSKPSLESLKAKAESYSNLEYNLQAGRRGSRYSHVEDLLCELTGAEAALVVNNNAAGVLLLLTALLSNQEVLVSRGQLVEIGGSFRIPDIISSVGARLKEVGATNKTHLKDYEAAIGEETGAILKVHTSNYRVIGFSEAPSDQDLVDLAHRKQLPIFNDLGSGLLLDLQPLGLPYEPTVQESIQAGYDVVTFSGDKLLGGPQAGILLGKAKYIKQLKGHPLLRALRVDKFTIAALEMTLQAYRKPQQAFETIPSLQLLSQSPDQLQAKAEALKEKIEGINGPYTVEVVPGQSQVGGGAYPEAKLATSLVEISHQTMTESQLERALRLSQDHIIARIADGKVQVDVRTLLEGDQDRIARVLAQIS

SEQ ID NO: 5819 - DNA, 1386 bp, Alloiococcus otitidis; identical to SEQ ID NO: 5817
  CDS (7)..(1383)

SEQ ID NO: 5820 - protein, 459 aa, Alloiococcus otitidis
MKDQLRQLPKMDDLLADEAIQKWQETFTEDLIKAVCNQVLDSLRQAILDGQSPSLSLDRVIRLVDEELTDRASLSFDRVVNATGTVLHTNLGRAILSKPSLESLKAKAESYSNLEYNLQAGRRGSRYSHVEDLLCELTGAEAALVVNNNAAGVLLLLTALLSNQEVLVSRGQLVEIGGSFRIPDIISSVGARLKEVGATNKTHLKDYEAAIGEETGAILKVHTSNYRVIGFSEAPSDQDLVDLAHRKQLPIFNDLGSGLLLDLQPLGLPYEPTVQESIQAGYDVVTFSGDKLLGGPQAGILLGKAKYIKQLKGHPLLRALRVDKFTIAALEMTLQAYRKPQQAFETIPSLQLLSQSPDQLQAKAEALKEKIEGINGPYTVEVVPGQSQVGGGAYPEAKLATSLVEISHQTMTESQLERALRLSQDHIIARIADGKVQVDVRTLLEGDQDRIARVLAQIS

SEQ ID NO: 5821 - DNA, 1911 bp, Alloiococcus otitidis
  CDS (124)..(1908)
agtaagataaggagggccacgtcattggcagataaagaaaacttggttgtgggcacagctggccatgtagaccatggcaagacaaccttgatcaaagctttaaccggtatcgaaacggacaccatggaagaggagcatagcagaggtctatcgattaacctaggctttgcttatatgaacttggacaatggcgaagaagtaggcatagtcgatgttcctggccatgaaaaatttttaaaaaatatgctggctggggcacctggtattgacctggtcctcttggttattgacgtcaatgaagggattatgccccaaaccatcgagcatgcggcgattttaagtcttctgggaattgagaactttatcatcgtcctgactaaggtggatggggcggatgaagatctcaaagagattgtttatgaagatattaaagatcgttttgacggcacccctttagcccaagcgcctattgtcgaaacagatgctgtgtctgggattggtttagatgacctgagacagcaaataactcaccagtgtcaaaatgtgacaagtaaccgccttgacctacctgcccggatgaatgtcgaccgggctttttcggttaaaggtattgggacggttgttacaggcaccttgaaagaaggggtgcttcatttgggagatgcgatcaccctctatccccaaaaaatccagacgaaaataaagaatattcaaatccataagaaagatgtggagacagcttatgccggcaaccggacagccttaaatctagccaaggtcgaccttgaccaggtcagtcggggagatgtcctgacaactggtccccttaaggctagttatatgttggatgtaaaggtcacctgcctaccccattccccctatgccctggaactttgggaccgggtccatgtctatctagggagccgggaagtcttagcccggcttgttccgattggcagtgaaaggatagaacctggtcaggaaggttacttgcagttgcggttagaagatgaggtaacggtgaagaagggtgaccggtttgtcttacggtcttactctcccctctatactattgctggcggggtagttttagatgaagccccagacaagcaccgccgttttaacgatgaggttattaaaagctttgaagttaaagagactggcgacttggctactttaaccctttacttccttgataaccggtcctttggcttgaccagtcaaaaagaaatcgccaactatttaaatgtcgaacacaaacgtcttaaagaaaccttagaagaactgatggctgaccagaaagtctaccaattcggcccaggctatatatcagagagcttattggaccaatttactgaccaggttgtaaaactactgcaagactaccatgagacttaccctatccggtccggcatgcccttagaagaattacgggggaacttggcccaggtggaggataaagaccgagaccgcctcttaaaacatatggaccaagagggggtcattagccaagatgataatacggttcgtgtagccggctttgacccaagcctgtctgaagaacaagaccaggtcaagaggggtatggaaaaaacctacaaagaggctggctttaaaccgcccaaggccaaagaagtggtgggcgatgaccctgttaaggaagaaatcttgcggtctatggttgaccatgaactggtccggattgacaaggaggtctacctccaccaagatacttaccaggctgggaaagaagtagctattaaaaaaattaaggcagacgggtccattaccctggccgacttccgcgacttgcttggcacttctcgtaagtatgctgtttctttcttagagacattggacaatcagggtgtgaccaagcgcctaggagacaaacgaattttggcaaagtag

SEQ ID NO: 5822 - protein, 595 aa, Alloiococcus otitidis
MEEEHSRGLSINLGFAYMNLDNGEEVGIVDVPGHEKFLKNMLAGAPGIDLVLLVIDVNEGIMPQTIEHAAILSLLGIENFIIVLTKVDGADEDLKEIVYEDIKDRFDGTPLAQAPIVETDAVSGIGLDDLRQQITHQCQNVTSNRLDLPARMNVDRAFSVKGIGTVVTGTLKEGVLHLGDAITLYPQKIQTKIKNIQIHKKDVETAYAGNRTALNLAKVDLDQVSRGDVLTTGPLKASYMLDVKVTCLPHSPYALELWDRVHVYLGSREVLARLVPIGSERIEPGQEGYLQLRLEDEVTVKKGDRFVLRSYSPLYTIAGGVVLDEAPDKHRRFNDEVIKSFEVKETGDLATLTLYFLDNRSFGLTSQKEIANYLNVEHKRLKETLEELMADQKVYQFGPGYISESLLDQFTDQVVKLLQDYHETYPIRSGMPLEELRGNLAQVEDKDRDRLLKHMDQEGVISQDDNTVRVAGFDPSLSEEQDQVKRGMEKTYKEAGFKPPKAKEVVGDDPVKEEILRSMVDHELVRIDKEVYLHQDTYQAGKEVAIKKIKADGSITLADFRDLLGTSRKYAVSFLETLDNQGVTKRLGDKRILAK

SEQ ID NO: 5823 - DNA, 1911 bp, Alloiococcus otitidis; identical to SEQ ID NO: 5821
  CDS (49)..(1908)

SEQ ID NO: 5824 - protein, 620 aa, Alloiococcus otitidis
MGTAGHVDHGKTTLIKALTGIETDTMEEEHSRGLSINLGFAYMNLDNGEEVGIVDVPGHEKFLKNMLAGAPGIDLVLLVIDVNEGIMPQTIEHAAILSLLGIENFIIVLTKVDGADEDLKEIVYEDIKDRFDGTPLAQAPIVETDAVSGIGLDDLRQQITHQCQNVTSNRLDLPARMNVDRAFSVKGIGTVVTGTLKEGVLHLGDAITLYPQKIQTKIKNIQIHKKDVETAYAGNRTALNLAKVDLDQVSRGDVLTTGPLKASYMLDVKVTCLPHSPYALELWDRVHVYLGSREVLARLVPIGSERIEPGQEGYLQLRLEDEVTVKKGDRFVLRSYSPLYTIAGGVVLDEAPDKHRRFNDEVIKSFEVKETGDLATLTLYFLDNRSFGLTSQKEIANYLNVEHKRLKETLEELMADQKVYQFGPGYISESLLDQFTDQVVKLLQDYHETYPIRSGMPLEELRGNLAQVEDKDRDRLLKHMDQEGVISQDDNTVRVAGFDPSLSEEQDQVKRGMEKTYKEAGFKPPKAKEVVGDDPVKEEILRSMVDHELVRIDKEVYLHQDTYQAGKEVAIKKIKADGSITLADFRDLLGTSRKYAVSFLETLDNQGVTKRLGDKRILAK

SEQ ID NO: 5825 - DNA, 1911 bp, Alloiococcus otitidis; identical to SEQ ID NO: 5821
  CDS (25)..(1908)

SEQ ID NO: 5826 - protein, 628 aa, Alloiococcus otitidis
MADKENLVVGTAGHVDHGKTTLIKALTGIETDTMEEEHSRGLSINLGFAYMNLDNGEEVGIVDVPGHEKFLKNMLAGAPGIDLVLLVIDVNEGIMPQTIEHAAILSLLGIENFIIVLTKVDGADEDLKEIVYEDIKDRFDGTPLAQAPIVETDAVSGIGLDDLRQQITHQCQNVTSNRLDLPARMNVDRAFSVKGIGTVVTGTLKEGVLHLGDAITLYPQKIQTKIKNIQIHKKDVETAYAGNRTALNLAKVDLDQVSRGDVLTTGPLKASYMLDVKVTCLPHSPYALELWDRVHVYLGSREVLARLVPIGSERIEPGQEGYLQLRLEDEVTVKKGDRFVLRSYSPLYTIAGGVVLDEAPDKHRRFNDEVIKSFEVKETGDLATLTLYFLDNRSFGLTSQKEIANYLNVEHKRLKETLEELMADQKVYQFGPGYISESLLDQFTDQVVKLLQDYHETYPIRSGMPLEELRGNLAQVEDKDRDRLLKHMDQEGVISQDDNTVRVAGFDPSLSEEQDQVKRGMEKTYKEAGFKPPKAKEVVGDDPVKEEILRSMVDHELVRIDKEVYLHQDTYQAGKEVAIKKIKADGSITLADFRDLLGTSRKYAVSFLETLDNQGVTKRLGDKRILAK

SEQ ID NO: 5827 - DNA, 369 bp, Alloiococcus otitidis
  CDS (121)..(366)
gaaagaaacagcatacttacgagaagtgccaagcaagtcgcggaagtcggccagggtaatggacccgtctgccttaatttttttaatagctacttctttcccagcctggtaagtatcttggtggaggtagacctccttgtcaatccggaccagttcatggtcaaccatagaccgcaagatttcttccttaacagggtcatcgcccaccacttctttggccttgggcggtttaaagccagcctctttgtaggttttttccatacccctcttgacctggtcttgttcttcagacaggcttgggtcaaagccggctacacgaaccgtattatcatcttggctaatgaccccctcttggtccatatgttttaa

SEQ ID NO: 5828 - protein, 82 aa, Alloiococcus otitidis
MEVDLLVNPDQFMVNHRPQDFFLNRVIAHHFFGLGRFKASLFVGFFHTPLDLVLFFRQAWVKAGYTNRIIILANDPLLVHMF

SEQ ID NO: 5829 - DNA, 246 bp, Alloiococcus otitidis
  CDS (10)..(243)
acaatctctttgagatcttcatccgccccatccaccttagtcaggacgatgataaagttctcaattcccagaagacttaaaatcgccgcatgctcgatggtttggggcataatcccttcattgacgtcaataaccaagaggaccaggtcaataccaggtgccccagccagcatattttttaaaaatttttcatggccaggaacatcgactatgcctacttcttcgccattgtccaagttcatataa

SEQ ID NO: 5830 - protein, 78 aa, Alloiococcus otitidis
MRSSSAPSTLVRTMIKFSIPRRLKIAACSMVWGIIPSLTSITKRTRSIPGAPASIFFKNFSWPGTSTMPTSSPLSKFI

SEQ ID NO: 5831 - DNA, 984 bp, Alloiococcus otitidis
  CDS (163)..(981)
aatgctaaaataggtccgggcgacctcagcgaaatactcaaacaactaccgatcaaagaagatgataacttactagtgggctatgattcttcagacgatgcctccgtttaccgcttaacggatgatttagccttaatccagactatcgatttcttcccatctatggtgtcagacccttacttgtttggccaaattgcagcagccaactccttaagtgatgtctatgccatgggaggtagggtgatttcagcccttaatattgtgactttccctgaccaaggaaattatgacatgctaggtcaaatcctaaaaggtggagcagacaaggttcacgaagcggatgcggtcttgagtgggggccactccatccacgatgatacggctaagtatggtttatccgtgactggtttggttcacccagacaagattatcgaaaacgacaaggcccaggttggggattctttgatcctaacgaaacctttgggaactggtctgattacaacagcacataaggctgatgctattagccaggaggcttacgaccaggcttgtcagtggatgactacccttaacaagggggttggccaagttatgcaaggctaccagatttcttcggcaacagacgtgactggttttggcttgctgggccacttgaaagaaatgacggctggtaaggtcactgctcacttggaagctagtcaaattccagctatgaaggaagcctaccaggctgctagcctacgaatggtgaccggtggcgcacggaaaaaccggaatttcttggaagaagaagttcaattcaacctttctgacagggctatggaagaaatcctttacgacccccaaacttcaggcggtctgttaatcagtattagctctgaccaggttcaagacttattagctgacttaaaagaccagcaggtttttggccaaatcattggtaagattggtgaaaaagaagataagaccatcattatcaattaa

SEQ ID NO: 5832 - protein, 273 aa, Alloiococcus otitidis
MVSDPYLFGQIAAANSLSDVYAMGGRVISALNIVTFPDQGNYDMLGQILKGGADKVHEADAVLSGGHSIHDDTAKYGLSVTGLVHPDKIIENDKAQVGDSLILTKPLGTGLITTAHKADAISQEAYDQACQWMTTLNKGVGQVMQGYQISSATDVTGFGLLGHLKEMTAGKVTAHLEASQIPAMKEAYQAASLRMVTGGARKNRNFLEEEVQFNLSDRAMEEILYDPQTSGGLLISISSDQVQDLLADLKDQQVFGQIIGKIGEKEDKTIIIN

SEQ ID NO: 5833 - DNA, 984 bp, Alloiococcus otitidis; identical to SEQ ID NO: 5831
  CDS (76)..(981)

SEQ ID NO: 5834 - protein, 302 aa, Alloiococcus otitidis
MGYDSSDDASVYRLTDDLALIQTIDFFPSMVSDPYLFGQIAAANSLSDVYAMGGRVISALNIVTFPDQGNYDMLGQILKGGADKVHEADAVLSGGHSIHDDTAKYGLSVTGLVHPDKIIENDKAQVGDSLILTKPLGTGLITTAHKADAISQEAYDQACQWMTTLNKGVGQVMQGYQISSATDVTGFGLLGHLKEMTAGKVTAHLEASQIPAMKEAYQAASLRMVTGGARKNRNFLEEEVQFNLSDRAMEEILYDPQTSGGLLISISSDQVQDLLADLKDQQVFGQIIGKIGEKEDKTIIIN

SEQ ID NO: 5835 - DNA, 1125 bp, Alloiococcus otitidis
  CDS (19)..(1122)
tatgagaggaatgacgggatgacagaattagttgatcaggcgagtgactttgctaataaatatattgaaccagttgctcaaaaattagatgaggaaaaggcttttccagaagaagtctttgaaaaacttcacgaagaaagatacttacaactcctaatcccccaagaagaaggcggcattgggggggatattgttgacttagttgacatcatttggacttttgcccagaaatctgccacagtgggcttgacctacttgatgcacaatgtggccctggatggtgtccttaaaacggcccatgaagagaccagaaaaagaatcatccaagaagtgattgaagaaggtaagtttcttggtttggcttactccgaaacttctgggggagtccaatttacaaaaccagaccgaacctcagctaaaaaagatggggaccattggatcttaagtggtgccaagtccatggtgacttccgcaacctttgccgactattatgtggtcaacgctacaggaccagatgaggatgaagaccctaaacatttcttggtttcaaaagatgctgacggcgtcacttttaaaatggaatggtggtctggcctaggcatgcgggggaatgtttcttgcccaatgttcttggaggatgtgtccatttcggaagccgaccgcttggataacccacagacccacactatcttcttggttggactagctgccgtctattctggtttaaacacagctatcgtggacgaagctgttatgcatactactgaccgccagtatcctgatggccacaaattgtccgaagtcgatgctattaaaggacatatatccactatctactccaacgcccaagcagcaactgccctaaccagacaagccgctcaggctgcccgagaagacctgaatgcggccttccctcaagttttagcggcccgggttgtggctaccgaaaatgtgaccgaatctgctaacctaggcatgcggattggtggaggacgggcttataccggcttccgcaactttgaactctacttgcgtgacgccttggctggccaagtcatggcaccatctttggacatgttaaaacaatggataggggcaaccattactggccaagatattgactaa

SEQ ID NO: 5836 - protein, 368 aa, Alloiococcus otitidis
MTELVDQASDFANKYIEPVAQKLDEEKAFPEEVFEKLHEERYLQLLIPQEEGGIGGDIVDLVDIIWTFAQKSATVGLTYLMHNVALDGVLKTAHEETRKRIIQEVIEEGKFLGLAYSETSGGVQFTKPDRTSAKKDGDHWILSGAKSMVTSATFADYYVVNATGPDEDEDPKHFLVSKDADGVTFKMEWWSGLGMRGNVSCPMFLEDVSISEADRLDNPQTHTIFLVGLAAVYSGLNTAIVDEAVMHTTDRQYPDGHKLSEVDAIKGHISTIYSNAQAATALTRQAAQAAREDLNAAFPQVLAARVVATENVTESANLGMRIGGGRAYTGFRNFELYLRDALAGQVMAPSLDMLKQWIGATITGQDID

SEQ ID NO: 5837 - DNA, 1188 bp, Alloiococcus otitidis
  CDS (220)..(1185)
ggccaagcgggacagaaacatagaccctatttttttgaactggttttgttatcaaaactgaaaaatgaaaggactgatggtgtgtctgaaatcttagataaggcgactgaatttgccaaacactatatccaaccggtggctcaagaattagatgaagaagctgcctttccgcaagatatttttgccaagctccatgaagagcgataccttgaattactgatgccagaagacttaggtggacttggcggggatattgtagacctagttgaggtcacctgggcctttgccaaagagtcagccacagtcggcttaacctacttgatgcacaatgtagccttagctgctgtcctccaggctgccaaagaaaagactaaacagcaaattgtcaaagaggtcaaggaagatggcaagttcctggccttagcctattccgaaacctcaggcggggtagaaacgagaaaacctgaccggactgtcgccaaaaaagaaggagacacttggaccatcaacggggcaaaatcaatggtgacttctgccacttttgctgactattacgtcattatcgccaaagatgaccaagagggagaagaccctaaaaacttcatcgtcgctaaggatggtcccgggatcagctttaaaatggaatggtggtctggcctcggcatgcggggcaatgtctcctgcccgatgtttatggatggggtccaagtcccggattcttaccggcttgaaaaccctaaaacccacgccgtctttctagcgggactggctgctgtttactcaggactcaatatggccatcgcccaagaagctattgaccacacccaggaccgccagtacccagatggccacaagctagcagaggtagatgccattaaaggccatctttcggctatttactccaaagccatggctgggactgctttaaccaagcaagctgcccaggcaggccgggatgaccttgaagctgcctttccccaaatcttagctgcccgagttgtggcaaccgaaaatgttattgaatcagctaacctgggtatgcggattggcggtggccgggcttacacgggctacaagaactttgagctctatttaagagatgctcttgccagtcaagtcatggccccatccttggacatgctgcaagaatggataggagagaccttgacgggtcaagagatggattaa

SEQ ID NO: 5838 - protein, 322 aa, Alloiococcus otitidis
MPEDLGGLGGDIVDLVEVTWAFAKESATVGLTYLMHNVALAAVLQAAKEKTKQQIVKEVKEDGKFLALAYSETSGGVETRKPDRTVAKKEGDTWTINGAKSMVTSATFADYYVIIAKDDQEGEDPKNFIVAKDGPGISFKMEWWSGLGMRGNVSCPMFMDGVQVPDSYRLENPKTHAVFLAGLAAVYSGLNMAIAQEAIDHTQDRQYPDGHKLAEVDAIKGHLSAIYSKAMAGTALTKQAAQAGRDDLEAAFPQILAARVVATENVIESANLGMRIGGGRAYTGYKNFELYLRDALASQVMAPSLDMLQEWIGETLTGQEMD

SEQ ID NO: 5839 - DNA, 1188 bp, Alloiococcus otitidis; identical to SEQ ID NO: 5837
  CDS (82)..(1185)

SEQ ID NO: 5840 - protein, 368 aa, Alloiococcus otitidis
MSEILDKATEFAKHYIQPVAQELDEEAAFPQDIFAKLHEERYLELLMPEDLGGLGGDIVDLVEVTWAFAKESATVGLTYLMHNVALAAVLQAAKEKTKQQIVKEVKEDGKFLALAYSETSGGVETRKPDRTVAKKEGDTWTINGAKSMVTSATFADYYVIIAKDDQEGEDPKNFIVAKDGPGISFKMEWWSGLGMRGNVSCPMFMDGVQVPDSYRLENPKTHAVFLAGLAAVYSGLNMAIAQEAIDHTQDRQYPDGHKLAEVDAIKGHLSAIYSKAMAGTALTKQAAQAGRDDLEAAFPQILAARVVATENVIESANLGMRIGGGRAYTGYKNFELYLRDALASQVMAPSLDMLQEWIGETLTGQEMD

SEQ ID NO: 5841 - DNA, 1188 bp, Alloiococcus otitidis; identical to SEQ ID NO: 5837
  CDS (46)..(1185)

SEQ ID NO: 5842 - protein, 380 aa, Alloiococcus otitidis
MLSKLKNERTDGVSEILDKATEFAKHYIQPVAQELDEEAAFPQDIFAKLHEERYLELLMPEDLGGLGGDIVDLVEVTWAFAKESATVGLTYLMHNVALAAVLQAAKEKTKQQIVKEVKEDGKFLALAYSETSGGVETRKPDRTVAKKEGDTWTINGAKSMVTSATFADYYVIIAKDDQEGEDPKNFIVAKDGPGISFKMEWWSGLGMRGNVSCPMFMDGVQVPDSYRLENPKTHAVFLAGLAAVYSGLNMAIAQEAIDHTQDRQYPDGHKLAEVDAIKGHLSAIYSKAMAGTALTKQAAQAGRDDLEAAFPQILAARVVATENVIESANLGMRIGGGRAYTGYKNFELYLRDALASQVMAPSLDMLQEWIGETLTGQEMD

SEQ ID NO: 5843 - DNA, 483 bp, Alloiococcus otitidis
  CDS (55)..(480)
gagatcgttatgaccagtcataaaccaaaagaatctcaagtctacagccttcatatgcgggggaccaaccctgatttggacaaggtcaaactctatactggacggaagcggttcgacgttgacaaagtggttagctttgacattgaagacgaaggctattctgctgtgtcctatttcatggggagcattctgtcgtcagttatttggaccttccaaaaccacttgaaacaaaagaaaatagacctggatgaaattgaaggggttattgaggcagacctccaaaaccctttgcgacttgttcctgtccggggttatgaccagccggctcaaattcaaaatatcaaggtcaaaatctactattatgctgatgacgatgaagatgagttagatcaaatggcaagggattgtcaagttgacaaccccatcttccaattggtcaaccaatcttccccgattgagatagaaccccactttattttgtag

SEQ ID NO: 5844 - protein, 142 aa, Alloiococcus otitidis
MRGTNPDLDKVKLYTGRKRFDVDKVVSFDIEDEGYSAVSYFMGSILSSVIWTFQNHLKQKKIDLDEIEGVIEADLQNPLRLVPVRGYDQPAQIQNIKVKIYYYADDDEDELDQMARDCQVDNPIFQLVNQSSPIEIEPHFIL

SEQ ID NO: 5845 - DNA, 483 bp, Alloiococcus otitidis; identical to SEQ ID NO: 5843
  CDS (10)..(480)

SEQ ID NO: 5846 - protein, 157 aa, Alloiococcus otitidis
MTSHKPKESQVYSLHMRGTNPDLDKVKLYTGRKRFDVDKVVSFDIEDEGYSAVSYFMGSILSSVIWTFQNHLKQKKIDLDEIEGVIEADLQNPLRLVPVRGYDQPAQIQNIKVKIYYYADDDEDELDQMARDCQVDNPIFQLVNQSSPIEIEPHFIL

SEQ ID NO: 5847 - DNA, 1188 bp, Alloiococcus otitidis
  CDS (1)..(1185)
atgttgatgactgttcaaagttttgccaactcactgattggctccatgccccggtctaaaaccttattaaaagcccagcgtgacctcagcaaaaatcgtctcgaacaagacgaatatgaggacttggtttaccaagaaaccgaaaaaattgttcgactccaagaaaagtatgacctggactatatcgtctcaggtgaacttgccagggacaattacgtttcttttattgccaattccttaaacaatgtcaaaatgatgagcaatacagaaatgctggactatattgaggacaagcaggcctatgaagacatgctaggcattttagacgttcctggcagtgtgatcaaaaacgccatctgctttggtaaaatcagccgggacaagtccttggttggatcagaattaaaaatgttaaaagaaatgaccgaccacaaggttaaaattaccctgcctggaccttacttggtcacccggtccatgtggctcaagggcctgtctgacaacttctatgactcaaaagaagaactgggggaagacgttgtccagtgcctaacagatgaagtaaaagacttgcagaagcttggggtggacaccgttcaatttgatgagccagtcttgaccgaagttgtcttctcaccagagcacacccggacctttatgtgtgcctccttgtcagagaaaaaagacccaactgatgaacttgcatttgccaaggacttgctcaagaaaacctttgacggcatcgaccgtagtcaaagcaatgtggccctccatgtttgccggggtaactggtccaaagatgaaagcattttacttgaaggcccctacacccccttgttagacttgtttgactatgctaacccagatattctctacttggaatattcgacagaccgggccgggagtattgattccttgttcaccaaccaccaatttggtgagaagaccattttaggcttgggggttatgaaccctcgtaaggatgaaacagaaagcaaggagacgattatcaagcaagtggaccgggctcttgactacctgccagctgaccggattaacttgaacccagattgtggctttgccactttttccaaaaaaccggtcaacagcctagcatttatcgaaaacaagctccaagtcttaagtgaagtcaagcaagaattgagagatcgttatgaccagtcataa

SEQ ID NO: 5848 - protein, 395 aa, Alloiococcus otitidis
MLMTVQSFANSLIGSMPRSKTLLKAQRDLSKNRLEQDEYEDLVYQETEKIVRLQEKYDLDYIVSGELARDNYVSFIANSLNNVKMMSNTEMLDYIEDKQAYEDMLGILDVPGSVIKNAICFGKISRDKSLVGSELKMLKEMTDHKVKITLPGPYLVTRSMWLKGLSDNFYDSKEELGEDVVQCLTDEVKDLQKLGVDTVQFDEPVLTEVVFSPEHTRTFMCASLSEKKDPTDELAFAKDLLKKTFDGIDRSQSNVALHVCRGNWSKDESILLEGPYTPLLDLFDYANPDILYLEYSTDRAGSIDSLFTNHQFGEKTILGLGVMNPRKDETESKETIIKQVDRALDYLPADRINLNPDCGFATFSKKPVNSLAFIENKLQVLSEVKQELRDRYDQS

SEQ ID NO: 5849 - DNA, 840 bp, Alloiococcus otitidis
  CDS (22)..(837)
tctaataggaggaattcattaatgtctgatagcttaaaagttggtgcagttgtttatgatcccaaggtaaccgttgtctgggagaaaatagttgattttattcaagcaaatggtgaagggcttgaagttgaaccggtcttttttgataactaccgcaaccaggttcaaggactcttggatggcgaagttgacctagcttggaactctcccttggctaacctagaggctgagttgaagtctggtggccaagtggtccatgcttgtatgcgggacactgaccgtgacttgcacagtgttttggtaactagaaaagatagtgatatcaaaagtgtttccgacctcaaaggacaaaaaatcgcctttggtgcccaagactctcctcaagctcgcttgatccccatccaatacttgcgagaagaaggtctggcttacggcaaggactatgaagaagtacggtttgacctaggccttggtttggatggggaccacgttggtggcgaaaaagacgccttgcagtccgttcagtcgggtgaaaatgcagctggctttgccatagctggcaactatgagggttggctcaaagatgggactttggatgaaaaccaattggaagtgattggccaaacgaaatcttttgaccactgtatttttaccggtcgtccaggccttgacaaagacctaatcgatcaatttacgaaagtcttgaagaaaatggactacgacaagccagaggacaaggaaatcctagacttagaaggcctcaaagaatggataccgggccggaccagtaactatgaagaaatacgtcaagcagtcgactatttagacttttttgattaa

SEQ ID NO: 5850 - protein, 272 aa, Alloiococcus otitidis
MSDSLKVGAVVYDPKVTVVWEKIVDFIQANGEGLEVEPVFFDNYRNQVQGLLDGEVDLAWNSPLANLEAELKSGGQVVHACMRDTDRDLHSVLVTRKDSDIKSVSDLKGQKIAFGAQDSPQARLIPIQYLREEGLAYGKDYEEVRFDLGLGLDGDHVGGEKDALQSVQSGENAAGFAIAGNYEGWLKDGTLDENQLEVIGQTKSFDHCIFTGRPGLDKDLIDQFTKVLKKMDYDKPEDKEILDLEGLKEWIPGRTSNYEEIRQAVDYLDFFD

SEQ ID NO: 5851 - DNA, 1134 bp, Alloiococcus otitidis
  CDS (16)..(1131)
ataaatcaagagaggatggataaagtgactaaaatatttgaccaggccagccaatttggtagccaatatattgaaccggtagcagacaaattagataaagaaaaagcttttccggaagaggtttttgacaagcttcaccaagaaaagtacttagaattactgattcctaaagaactgggcggacaaggtggggatattgtcgaccacactgaagttatccgggctttttcggctaaatcagctactgttggcttgacctacatgatgcacaatgtggccttaaatgccgtggttcagtcaggagaagaagccaccaagcaaaaaattatcaaagaagtcattgaagatggcaagttcctagccttagcttactccgaaccgacaggcggggtagaattttacaaaccagataccacccaggctgttaaagacggaaacaagtggactattaacgggtcaaaatccatggttacttcagcaacctttgccgactattatattgtgattgctaaaaccattgaaggtgaagaagatgctgaaaacttcctcgttgccaaagatgcagatggggtcaactttaaaatggaattatggaatggtttggggatgcgggggaatgtttcctgcccaatggacttaaaagatgtggtcgtcaatgaccaagaccgcttggaagacccggacatcgttcctctcttccttgctggcttggcggcagtctattctggcttgaatatggccattgcccaagaagccatcagtcatgctatggaccggcaatatccggatggccacaagttgtcagaagtagacaccatcaagagccatatttcaaaaatatacagtaatgccgtttctgctgcagcggtgaccaaggatgcagcttatgacggacgagaggaccttgaagcagcccttcctaaaatcttagcagcccgggtggttgccactgaaaatgttaatgaatcagctaacttaggtatgcggctcggtggtggccgagcttatacaggttacaaaaactttgaactttacttgagagacgccttggctggacaagtcatggcaccatccttggacatgctctaccaatggattggggctgccttgaccgaccaagatatgatccagtag

SEQ ID NO: 5852 - protein, 372 aa, Alloiococcus otitidis
MDKVTKIFDQASQFGSQYIEPVADKLDKEKAFPEEVFDKLHQEKYLELLIPKELGGQGGDIVDHTEVIRAFSAKSATVGLTYMMHNVALNAVVQSGEEATKQKIIKEVIEDGKFLALAYSEPTGGVEFYKPDTTQAVKDGNKWTINGSKSMVTSATFADYYIVIAKTIEGEEDAENFLVAKDADGVNFKMELWNGLGMRGNVSCPMDLKDVVVNDQDRLEDPDIVPLFLAGLAAVYSGLNMAIAQEAISHAMDRQYPDGHKLSEVDTIKSHISKIYSNAVSAAAVTKDAAYDGREDLEAALPKILAARVVATENVNESANLGMRLGGGRAYTGYKNFELYLRDALAGQVMAPSLDMLYQWIGAALTDQDMIQ

SEQ ID NO: 5853 - DNA, 339 bp, Alloiococcus otitidis
  CDS (1)..(336)
atgagttatgatattgttgtgacaagcaaagccatgggggaaggcgaaaaggacttgacagagaacttgatgctgaccttcctccataccttaactgaaaaagtggacctaccagaccacttgtggttttacggagatggggcttttttaactgctacaggctcaaaagccttagatgatctctttaacttagccgaaagaggcgttgatattgctagctgtgggacctgtgtcaactattatgacttaaatgataagattgaagttggcaccattacttccatgcctaagattgtggacctgtttgctaatagtcctaaagttgtcttcccagcttaa

SEQ ID NO: 5854 - protein, 112 aa, Alloiococcus otitidis
MSYDIVVTSKAMGEGEKDLTENLMLTFLHTLTEKVDLPDHLWFYGDGAFLTATGSKALDDLFNLAERGVDIASCGTCVNYYDLNDKIEVGTITSMPKIVDLFANSPKVVFPA

SEQ ID NO: 5855 - DNA, 1200 bp, Alloiococcus otitidis
  CDS (34)..(1197)
aaaaccaaaaaacacattgaaaggaagatcattatgactcaactcaatcttacactagacgccaataaattaacagacgcaattttaaattgtgatctggatcaagtgatgaaatccaccttagtgacggtcttaaatgcttatatggagtccgagcgcgaccaatatatgaaaagcaagcggtacgagcgagatgaagatcgctgtgattaccgcaatgggtattacgagcgagatttcaccacgaaaatcggcaccctcaagctcaacgtgcccagaacgcgatcaggcgacttccatacccaattatttgaactcaatcagcggatggatcaaggcctattggctaccatctttgagatgtacgtcaatggcatctccacccgcaaaatgacgaaagtcgtcgaatccctttgtggtcaaaaggtctccaaatcgtttgtctccgatgtcaataaacacctggacaaggatgtctttaactttcaaaagcggtccctcacccatactaatttccggtatatctatgtcgatgccatgtatataaaggtccgagaggataaccgggtggtgtccaaagccctttacatcgcccaaggagtcaatgatgagaataggcgagaaatcatcgggtttaaagtggctgggcaagagtcaacggaaagttggcggtcgttcttcctcgatttaaaagccagaggcattgatacgccgaaaatggtgatttcagatgcccatgcaggcttacggaaagctattcaagaatgttttgtcaacaccacttggcaacgctgtacctttcacttattaagcaatatcaccgatgccttgccgaaaaccacggaccgagtcatccgagatcgtttccaagcggttttattttccagaacccagcaggaagctcgtgaacggaaacaagctttggaggcggaattcgaagaccaagcgaagctggctaaagccttgagcctattggatgagggctttgaagatgccattcagtatcagatcgagccttctccttaccacatgtctttaagaacaaccaattccattgaacgagtcaaccgtgaaattcgacgtcgagaaagagtggtggggattttccccaatatcaaatccgcggaacggctagccggctcgatcttattaaacctgcaggagaattgggaagctcagaactatcgatttttacgatag

SEQ ID NO: 5856 - protein, 388 aa, Alloiococcus otitidis
MTQLNLTLDANKLTDAILNCDLDQVMKSTLVTVLNAYMESERDQYMKSKRYERDEDRCDYRNGYYERDFTTKIGTLKLNVPRTRSGDFHTQLFELNQRMDQGLLATIFEMYVNGISTRKMTKVVESLCGQKVSKSFVSDVNKHLDKDVFNFQKRSLTHTNFRYIYVDAMYIKVREDNRVVSKALYIAQGVNDENRREIIGFKVAGQESTESWRSFFLDLKARGIDTPKMVISDAHAGLRKAIQECFVNTTWQRCTFHLLSNITDALPKTTDRVIRDRFQAVLFSRTQQEARERKQALEAEFEDQAKLAKALSLLDEGFEDAIQYQIEPSPYHMSLRTTNSIERVNREIRRRERVVGIFPNIKSAERLAGSILLNLQENWEAQNYRFLR

SEQ ID NO: 5857 - DNA, 1257 bp, Alloiococcus otitidis
  CDS (298)..(1254)
gggagccaatcttacttagaaggtatttctaagacgttggattctctccactatgcaaatgctgactcatacacctgccaaggtgtccatgtccatttaaatagtgatgttgttgacattaacccagaaggcaaaacgattacagttgaaacaccagacggacagcaccaagattcttacgacaaactctttatttccccaggctctgcaccaaatgtcttgaatattcctggcctaaactatgaccacatttacttcaccccaggaagagactggaccggtgccattaaacagagaatggaagaagccaaaaaagttgtcgttattggtggtggctacatcggtattgagtttggtgaagcgatttcccttgccaatattgataccactatcgttgaattcggggaaaccatcatcccaacctacttggataaagaatttactgaaaccttaaccagccatgccatcgatagtggcttgaagattaaaacttctgaggctgttcagcaaattctaggtgacgaagatggtaatgttagaggtgttgtcaccaacaagggtgaatatgaagcagacaccgttatttttgccgttggtatgcaccctgcaaccgactggctagacggggtcgtggacttgaaccctgatggcagtgtggtcgtcaatgactacatgcagacttcagacgaaaacatttatgccgctggagatgctactaaactgccatacggaccaactggtgaaaaaatcagaattggtttagcgacaaatgccagacgcggtggagctattgcagctaaaaacatgattgaaggaaacaaatacaaagcgccaaccatcaatggaacttccggcttgcgggtatttgactactacttcgcttcaacaggtatcaaggacattaacctcaacttgatccaagaagaagtcgaaagcaagtatgtagaagaacccctcttgccatccttcatgggtaacggtgaaaaaccagttggcacccttcgcatgaaaattcactatgttaaagatagccaccgtattgtaggggctcagtttatggctaaagatgatgtggttgggccactagccaactccatgtctatcgccttgactgctggttggaccctagagcaattagcgacagctgatttcttcttccaaccggaatacaatcgaccatggaactacttgaatgttctcgccatgcaagcccttggtgataactacacattcggtagtgacaccctactattttaa

SEQ ID NO: 5858 - protein, 319 aa, Alloiococcus otitidis
MEEAKKVVVIGGGYIGIEFGEAISLANIDTTIVEFGETIIPTYLDKEFTETLTSHAIDSGLKIKTSEAVQQILGDEDGNVRGVVTNKGEYEADTVIFAVGMHPATDWLDGVVDLNPDGSVVVNDYMQTSDENIYAAGDATKLPYGPTGEKIRIGLATNARRGGAIAAKNMIEGNKYKAPTINGTSGLRVFDYYFASTGIKDINLNLIQEEVESKYVEEPLLPSFMGNGEKPVGTLRMKIHYVKDSHRIVGAQFMAKDDVVGPLANSMSIALTAGWTLEQLATADFFFQPEYNRPWNYLNVLAMQALGDNYTFGSDTLLF

SEQ ID NO: 5859 - DNA, 1257 bp, Alloiococcus otitidis; identical to SEQ ID NO: 5857
  CDS (37)..(1254)

SEQ ID NO: 5860 - protein, 406 aa, Alloiococcus otitidis
MDSLHYANADSYTCQGVHVHLNSDVVDINPEGKTITVETPDGQHQDSYDKLFISPGSAPNVLNIPGLNYDHIYFTPGRDWTGAIKQRMEEAKKVVVIGGGYIGIEFGEAISLANIDTTIVEFGETIIPTYLDKEFTETLTSHAIDSGLKIKTSEAVQQILGDEDGNVRGVVTNKGEYEADTVIFAVGMHPATDWLDGVVDLNPDGSVVVNDYMQTSDENIYAAGDATKLPYGPTGEKIRIGLATNARRGGAIAAKNMIEGNKYKAPTINGTSGLRVFDYYFASTGIKDINLNLIQEEVESKYVEEPLLPSFMGNGEKPVGTLRMKIHYVKDSHRIVGAQFMAKDDVVGPLANSMSIALTAGWTLEQLATADFFFQPEYNRPWNYLNVLAMQALGDNYTFGSDTLLF

SEQ ID NO: 5861 - DNA, 732 bp, Alloiococcus otitidis
  CDS (64)..(729)
gtgggctttttgcctgccaaacacctactcctagtgtctcaacaagacttaggaggaataataatgactttcactgacgaattgaaagaaatgacacaagacacctgggaccggtctttaaaccacccatttgtaaagggagtcgctgacgggtccttgcccttggaaaaattcaagttctatatcttacaagacatttactatttaaaacattacggtaaagtccatgcctttgctgcagctcatgcggacgactttgacgtgacagctgacctggcccaaaaagcttctgaaacagcccagtcagagttaactgtccaccaagaacatgccgaaattttggatataaaaaaagaggaaatcgacaacttagatcctgccccaacggcctatgcctatacttctcacttgtaccgggcagccttgtccgggtctttaggcgaaatcgtcgctgccatcctcccttgctactggctatacgctgatattggcctacgctaccaggatgctagccctgaacctgacatctacaaaaactggattgccacttatgcaagcgactggtttcaagagtcgacccaagatatgattcagctaatgaatgatatcgccagccaagccagcgaggtcgaaaaaaacaagttcagacagcaatttaaaatagccaaggaatacgaacttggtttctgggaaatggcctacacctttgaagactggatttccaataagtaa

SEQ ID NO: 5862 - protein, 222 aa, Alloiococcus otitidis
MTFTDELKEMTQDTWDRSLNHPFVKGVADGSLPLEKFKFYILQDIYYLKHYGKVHAFAAAHADDFDVTADLAQKASETAQSELTVHQEHAEILDIKKEEIDNLDPAPTAYAYTSHLYRAALSGSLGEIVAAILPCYWLYADIGLRYQDASPEPDIYKNWIATYASDWFQESTQDMIQLMNDIASQASEVEKNKFRQQFKIAKEYELGFWEMAYTFEDWISNK

SEQ ID NO: 5863 - DNA, 732 bp, Alloiococcus otitidis; identical to SEQ ID NO: 5861
  CDS (10)..(729)

SEQ ID NO: 5864 - protein, 240 aa, Alloiococcus otitidis
MPAKHLLLVSQQDLGGIIMTFTDELKEMTQDTWDRSLNHPFVKGVADGSLPLEKFKFYILQDIYYLKHYGKVHAFAAAHADDFDVTADLAQKASETAQSELTVHQEHAEILDIKKEEIDNLDPAPTAYAYTSHLYRAALSGSLGEIVAAILPCYWLYADIGLRYQDASPEPDIYKNWIATYASDWFQESTQDMIQLMNDIASQASEVEKNKFRQQFKIAKEYELGFWEMAYTFEDWISNK

SEQ ID NO: 5865 - DNA, 732 bp, Alloiococcus otitidis; identical to SEQ ID NO: 5861
  CDS (1)..(729)

SEQ ID NO: 5866 - protein, 243 aa, Alloiococcus otitidis
MGFLPAKHLLLVSQQDLGGIIMTFTDELKEMTQDTWDRSLNHPFVKGVADGSLPLEKFKFYILQDIYYLKHYGKVHAFAAAHADDFDVTADLAQKASETAQSELTVHQEHAEILDIKKEEIDNLDPAPTAYAYTSHLYRAALSGSLGEIVAAILPCYWLYADIGLRYQDASPEPDIYKNWIATYASDWFQESTQDMIQLMNDIASQASEVEKNKFRQQFKIAKEYELGFWEMAYTFEDWISNK

SEQ ID NO: 5867 - DNA, 966 bp, Alloiococcus otitidis
  CDS (43)..(963)
ccattgtcgctggccaagttcgctatgaaagggaggaaaatcatgactgaagaaaacaatgaccgcttaagtattgaccttgccggtttgactttgaaaaaccccattatccccgcttctgggacagtggactatggggagcccctgatggaccactatgacttaggcatccttggaggcctggtgattaaaacgaccaccttggaggccagaaaaggagctccagaccctaaatttgcccacacagacaaggggattttaaatgcagttggcttgaagaacccaggaattgaagcagttttagccgaaaaattacctgccctggcccagtatgacctgcccattatcgccagtgtagccggcaagacaattgaggattatgtagaggtcacccagcaaatttcccaagcacccaatgtggtggccattgaagtgaatgcttcctgccccaatgttgccgaaggagggctagcctttgggaccaatccgaatattttggctgatttaacccggcaagtgaaggcagcgaccagcctgccagtctttgtcaaactaacccctaatgtgaccgacattgctgccttagcccaggcagctgaagggtctggagcagacggtttggtagccattaacacggtgaccggcttagccattgatattgaaacccgccaggccaagttgggtaatgtaaccggtggcttgtctgctggtagcttgaaacacattgccctccgtatggtccaccaggtggcccaggccgtttccatccctgtagttggagttgggggcatgtctaccattgatgatgtgatcgaaatgctgatggcaggtgccacagccgttcaaattgggtcagaaaactacctccaccccacggtctgcaaggaaataattgaaggcctgcccgaccgactcgaccagttgggcatagacaaaattaaggatattaaacgctttgatgcttag

SEQ ID NO: 5868 - protein, 307 aa, Alloiococcus otitidis
MTEENNDRLSIDLAGLTLKNPIIPASGTVDYGEPLMDHYDLGILGGLVIKTTTLEARKGAPDPKFAHTDKGILNAVGLKNPGIEAVLAEKLPALAQYDLPIIASVAGKTIEDYVEVTQQISQAPNVVAIEVNASCPNVAEGGLAFGTNPNILADLTRQVKAATSLPVFVKLTPNVTDIAALAQAAEGSGADGLVAINTVTGLAIDIETRQAKLGNVTGGLSAGSLKHIALRMVHQVAQAVSIPVVGVGGMSTIDDVIEMLMAGATAVQIGSENYLHPTVCKEIIEGLPDRLDQLGIDKIKDIKRFDA

SEQ ID NO: 5869 - DNA, 966 bp, Alloiococcus otitidis; identical to SEQ ID NO: 5867
  CDS (25)..(963)

SEQ ID NO: 5870 - protein, 313 aa, Alloiococcus otitidis
MKGRKIMTEENNDRLSIDLAGLTLKNPIIPASGTVDYGEPLMDHYDLGILGGLVIKTTTLEARKGAPDPKFAHTDKGILNAVGLKNPGIEAVLAEKLPALAQYDLPIIASVAGKTIEDYVEVTQQISQAPNVVAIEVNASCPNVAEGGLAFGTNPNILADLTRQVKAATSLPVFVKLTPNVTDIAALAQAAEGSGADGLVAINTVTGLAIDIETRQAKLGNVTGGLSAGSLKHIALRMVHQVAQAVSIPVVGVGGMSTIDDVIEMLMAGATAVQIGSENYLHPTVCKEIIEGLPDRLDQLGIDKIKDIKRFDA

SEQ ID NO: 5871 - DNA, 966 bp, Alloiococcus otitidis; identical to SEQ ID NO: 5867
  CDS (4)..(963)

SEQ ID NO: 5872 - protein, 320 aa, Alloiococcus otitidis
MSLAKFAMKGRKIMTEENNDRLSIDLAGLTLKNPIIPASGTVDYGEPLMDHYDLGILGGLVIKTTTLEARKGAPDPKFAHTDKGILNAVGLKNPGIEAVLAEKLPALAQYDLPIIASVAGKTIEDYVEVTQQISQAPNVVAIEVNASCPNVAEGGLAFGTNPNILADLTRQVKAATSLPVFVKLTPNVTDIAALAQAAEGSGADGLVAINTVTGLAIDIETRQAKLGNVTGGLSAGSLKHIALRMVHQVAQAVSIPVVGVGGMSTIDDVIEMLMAGATAVQIGSENYLHPTVCKEIIEGLPDRLDQLGIDKIKDIKRFDA

SEQ ID NO: 5873 - DNA, 465 bp, Alloiococcus otitidis
  CDS (7)..(462)
acggctgtggcacctgccatcagcatttcgatcacatcatcaatggtagacatgcccccaactccaactacagggatggaaacggcctgggccacctggtggaccatacggagggcaatgtgtttcaagctaccagcagacaagccaccggttacattacccaacttggcctggcgggtttcaatatcaatggctaagccggtcaccgtgttaatggctaccaaaccgtctgctccagacccttcagctgcctgggctaaggcagcaatgtcggtcacattaggggttagtttgacaaagactggcaggctggtcgctgccttcacttgccgggttaaatcagccaaaatattcggattggtcccaaaggctagccctccttcggcaacattggggcaggaagcattcacttcaatggccaccacattgggtgcttgggaaatttgctgggtgacctctacataa

SEQ ID NO: 5874 - protein, 152 aa, Alloiococcus otitidis
MAPAISISITSSMVDMPPTPTTGMETAWATWWTIRRAMCFKLPADKPPVTLPNLAWRVSISMAKPVTVLMATKPSAPDPSAAWAKAAMSVTLGVSLTKTGRLVAAFTCRVKSAKIFGLVPKASPPSATLGQEAFTSMATTLGAWEICWVTST

SEQ ID NO: 5875 - DNA, 1209 bp, Alloiococcus otitidis
  CDS (16)..(1206)
tacggaggagttaaaatgatcttaatcaaaaacggccaactggttgatagtcgtgggtcaatccaggccgatatccttttaaaagaagggaaaatccatgctattggtttaaacctggctagtgaaggctgcggtcgggtgattgatgccaaaggcaaagtggtcacccccgcctttgtcgaactccatgcccacttcagagaccctggtttgacctataaagaggacctggaaactgggtctcaagcagctctccatggcggatacgggacagttaacttgatggccaacaccaagccagtagtggataatcctgaagtttaccaagatattatgacccgagcccaggaactaggcttggttcatatctttcaaaattatgctgcctccaaggacctggccggccaagaacgagtcgactttgaccggataccagactcggttaagtttttatctgatgatggctttggtctctttaacaacaaggctacctttgaattgttccaagccctgaaggaaaaaaacttaggcattatgatccatgaagaagacaaggaactgtctgaaattgactaccgctacgctgaagacgtccataccttgagggatgtctactttgccggaaaaataggcaacccagttcacttctgtcatgtgtcgacagtcgatgccttggatgccgtccgctacggcaaggccaagggttacccggtcaccatggaagtaactccccaccatatctacctttacgactcagactttaaggtccacccaccaatccgggccaaggcagatgtagaggccctgattgaaggaatcttggacgggacggtggatgctattgctaccgaccatgctccccacagtgcagaagacaaagcccaagggtcaccaggcatgattggcttagagacagcctttcccattatctacaaggttttagtccaggaccacggccaggacctaagcctggtatcgaaattgctgagccacaatccagctaaaattctaggcttgaacaagggattgctagaagtgggctacgacggtgacttgacccttattgacctaaacaagacttatactgcccaagactttgcctccaagtcggacaatacgccctttaaaggacaaagttttgatggtttggtggagatgaccattgtcgctggccaagttcgctatgaaagggaggaaaatcatgactga

SEQ ID NO: 5876 - protein, 397 aa, Alloiococcus otitidis
MILIKNGQLVDSRGSIQADILLKEGKIHAIGLNLASEGCGRVIDAKGKVVTPAFVELHAHFRDPGLTYKEDLETGSQAALHGGYGTVNLMANTKPVVDNPEVYQDIMTRAQELGLVHIFQNYAASKDLAGQERVDFDRIPDSVKFLSDDGFGLFNNKATFELFQALKEKNLGIMIHEEDKELSEIDYRYAEDVHTLRDVYFAGKIGNPVHFCHVSTVDALDAVRYGKAKGYPVTMEVTPHHIYLYDSDFKVHPPIRAKADVEALIEGILDGTVDAIATDHAPHSAEDKAQGSPGMIGLETAFPIIYKVLVQDHGQDLSLVSKLLSHNPAKILGLNKGLLEVGYDGDLTLIDLNKTYTAQDFASKSDNTPFKGQSFDGLVEMTIVAGQVRYEREENHD

SEQ ID NO: 5877 - DNA, 438 bp, Alloiococcus otitidis
  CDS (1)..(435)
atgttagaagtttcttctattacaaatggcgtcgtgattgaccacatccaacccggagacggttacaagatttttaacctcttgaacttggatcgggcccaagaccgggtggcccttatgatgaatgtagatagtcagttgctaggtaaaaaagatattattaaaattcaaggggacttgagcgatattaactttgatattttaagtgtggttgaccctcatattaccgttaactatatcaaagatagccaaattgttgacaagggggaagtcgccctccctaagcggattaactcctacctgtcttgtaccaatccccgttgcattaccaataccgagccccatatcgaaccgagctttatcctggtcgacccggtggaaagtgtttatgcctgtgagtattgtgaacacctatatgatacggaggagttaaaatga

SEQ ID NO: 5878 - protein, 145 aa, Alloiococcus otitidis
MLEVSSITNGVVIDHIQPGDGYKIFNLLNLDRAQDRVALMMNVDSQLLGKKDIIKIQGDLSDINFDILSVVDPHITVNYIKDSQIVDKGEVALPKRINSYLSCTNPRCITNTEPHIEPSFILVDPVESVYACEYCEHLYDTEELK

SEQ ID NO: 5879 - DNA, 228 bp, Alloiococcus otitidis
  CDS (1)..(225)
gtgtggttgaccctcatattaccgttaactatatcaaagatagccaaattgttgacaagggggaagtcgccctccctaagcggattaactcctacctgtcttgtaccaatccccgttgcattaccaataccgagccccatatcgaaccgagctttatcctggtcgacccggtggaaagtgtttatgcctgtgagtattgtgaacacctatatgatacggaggagttaa

SEQ ID NO: 5880 - protein, 75 aa, Alloiococcus otitidis
MWLTLILPLTISKIAKLLTRGKSPSLSGLTPTCLVPIPVALPIPSPISNRALSWSTRWKVFMPVSIVNTYMIRRS

SEQ ID NO: 5881 - DNA, 945 bp, Alloiococcus otitidis
  CDS (22)..(942)
aagtggaaggggaataaaggaatgactttatctgaaaaaaaccttgttcatattaaggatttcactgttgatgaaatcaatgacattattactttagcccaagatattattaagtgcccagatgattattcacatatttgtgatgggatcattctaggggcacttttttttgagccttcaacccggacccggctaagttttgaatctgctatccgccgtcttggggggactagtattggctttactgaagccaaatcctcctcaacggccaagggggagagcttggctgataccattcggacagtttcacaatacaccgatattattgccatgcgccacccccaagaaggggctgccatggtggcggggttggccagtgatgtaccctttatcaatgccggcgatggcggtcaccagcaccccacccagaccttgaccgacttacttaccattatggaaactaaggggcggttggaaggcttgacgattggtctttgcggggacctaaaatttggtcggaccgtccactccctgctccgtatgctgatgcagtaccctaacaaccgttttgtcctaatttcacccaaagagctggtggtgcccgactatattgaagtcatgcttaagcaaaataatgttgaatataagacagaagaacggttagaaagtgtaattgatgaattggatgtcctctacatgactagggttcaaaaggagcgattttttaacgaagccgactatgaacgtttgaaggattcgtatattttggacacgcccaagctagaccaagccaaagctgatttggccatcctccaccccctcccacgggtcaatgaaatccatgtttcagttgacgatgatcctcgggccaagtattttgaccaagttggctacggggtcagagtgcgtatggccttgatcttaaaaatgttaggagtgaagtaa

SEQ ID NO: 5882 - protein, 307 aa, Alloiococcus otitidis
MTLSEKNLVHIKDFTVDEINDIITLAQDIIKCPDDYSHICDGIILGALFFEPSTRTRLSFESAIRRLGGTSIGFTEAKSSSTAKGESLADTIRTVSQYTDIIAMRHPQEGAAMVAGLASDVPFINAGDGGHQHPTQTLTDLLTIMETKGRLEGLTIGLCGDLKFGRTVHSLLRMLMQYPNNRFVLISPKELVVPDYIEVMLKQNNVEYKTEERLESVIDELDVLYMTRVQKERFFNEADYERLKDSYILDTPKLDQAKADLAILHPLPRVNEIHVSVDDDPRAKYFDQVGYGVRVRMALILKMLGVK

SEQ ID NO: 5883 - DNA, 240 bp, Alloiococcus otitidis
  CDS (4)..(237)
gttttgaatctgctatccgccgtcttggggggactagtattggctttactgaagccaaatcctcctcaacggccaagggggagagcttggctgataccattcggacagtttcacaatacaccgatattattgccatgcgccacccccaagaaggggctgccatggtggcggggttggccagtgatgtaccctttatcaatgccggcgatggcggtcaccagcaccccacccagaccttga

SEQ ID NO: 5884 - protein, 78 aa, Alloiococcus otitidis
MNLLSAVLGGLVLALLKPNPPQRPRGRAWLIPFGQFHNTPILLPCATPKKGLPWWRGWPVMYPLSMPAMAVTSTPPRP

SEQ ID NO: 5885 - DNA, 396 bp, Alloiococcus otitidis
  CDS (106)..(393)
ttgttactgtcttcttcggaatcttcttccatgtcgtcttcagactcttcgtccataccgtcctcagactcttcttcggctccttggtccatatcgtcttcctctttgccattatcagggaacatgtcttcgtcggtttcttccttggtcatgccctcttcttgttgggtatcttcagcaggttcctcgttgttgttttggcaaccacctaagacgccaagtcctagtccaagtgcggcaagtaaagcgagtttgtttttcattttgcttttcctttctatgaaaagtagtgtaatttgccaggcaaaattttcctggtatgagttatacttggtttggggagccttttcccttcccaagctgactttattttaccactggaccggcttgaattga

SEQ ID NO: 5886 - protein, 96 aa, Alloiococcus otitidis
MPLSGNMSSSVSSLVMPSSCWVSSAGSSLLFWQPPKTPSPSPSAASKASLFFILLFLSMKSSVICQAKFSWYELYLVWGAFSLPKLTLFYHWTGLN

SEQ ID NO: 5887 - DNA, 357 bp, Alloiococcus otitidis
  CDS (25)..(354)
aattataactccaagattctacaattggtcagcgataatcgactttccccatctaaccagtcaagtaatctaaaaaaccacttgtgggctagcctccctctagggggtgtatggctagactacaagtggttgggcaggggcttagttgttactgtcttcttcggaatcttcttccatgtcgtcttcagactcttcgtccataccgtcctcagactcttcttcggctccttggtccatatcgtcttcctctttgccattatcagggaacatgtcttcgtcggtttcttccttggtcatgccctcttcttgttgggtatcttcagcaggttcctcgttgttgttttggcaaccacctaa

SEQ ID NO: 5888 - protein, 110 aa, Alloiococcus otitidis
MVSDNRLSPSNQSSNLKNHLWASLPLGGVWLDYKWLGRGLVVTVFFGIFFHVVFRLFVHTVLRLFFGSLVHIVFLFAIIREHVFVGFFLGHALFLLGIFSRFLVVVLATT

SEQ ID NO: 5889 - DNA, 375 bp, Alloiococcus otitidis
  CDS (109)..(372)
aataaagtcagcttgggaagggaaaaggctccccaaaccaagtataactcataccaggaaaattttgcctggcaaattacactacttttcatagaaaggaaaagcaaaatgaaaaacaaactcgctttacttgccgcacttggactaggacttggcgtcttaggtggttgccaaaacaacaacgaggaacctgctgaagatacccaacaagaagagggcatgaccaaggaagaaaccgacgaagacatgttccctgataatggcaaagaggaagacgatatggaccaaggagccgaagaagagtctgaggacggtatggacgaagagtctgaagacgacatggaagaagattccgaagaagacagtaacaactaa

SEQ ID NO: 5890 - protein, 88 aa, Alloiococcus otitidis
MKNKLALLAALGLGLGVLGGCQNNNEEPAEDTQQEEGMTKEETDEDMFPDNGKEEDDMDQGAEEESEDGMDEESEDDMEEDSEEDSNN

SEQ ID NO: 5891 - DNA, 375 bp, Alloiococcus otitidis; identical to SEQ ID NO: 5889
  CDS (13)..(372)

SEQ ID NO: 5892 - protein, 120 aa, Alloiococcus otitidis
MGREKAPQTKYNSYQENFAWQITLLFIERKSKMKNKLALLAALGLGLGVLGGCQNNNEEPAEDTQQEEGMTKEETDEDMFPDNGKEEDDMDQGAEEESEDGMDEESEDDMEEDSEEDSNN

SEQ ID NO: 5893 - DNA, 1386 bp, Alloiococcus otitidis
  CDS (466)..(1383)
agaattacggaaaaaattgaacttggactgtattgtcaccatccgcaatgtgggctacaagttggagcgaaaatgaaaaatttaaaattatttcccaaaatgtttctgcaaatttttgccatcttatccgtcttgatcctggctatccacctctttgtcttttttgcctttccaaagtcctacttggccagccgtcaggaagaaattgtcagccaagcagaccaaattgctgaccagctagaaggacaggacctggattatgtccaggctagcttagatttttactccaaaacgaatgatataagggccagtctgaaggaaggagggggagaaaatgaactcgccatccaagatggagttggagttgatttgaccagtgaaaacaactctttgattatagaagaacgcccccttgatttggcggacggtggtcagaggaccctgcaatttgtttccacagctgatatgcaaagagaggcccgggacttgtccctgcaatttttaccctattcactagccttgtcgcttttaatttccattctcttagcccttctttacgctcaagtgaccaaaagacaaatccaggagattaaggacatcactgaccggatgatggacttggatcgggcagcctggctcaaggtcgattctagcaatgaagttggtcaacttaaagaccagatcaatgatctctataggagcttgctccagaccatcgacgatttggaagataagaacgaagaaataattaagctggaaaacttacgctatgactttttccgtgggacttcccatgaactcaagactcccttggctagtctgaaagtagtattagaaaacatgcaatacaatatcggcaaatacaaggaccgggacaagtatattggcaaaagcattgcccttgtggacgacttaacccagcacatctcccagcttctttcaatttcttccctggaccatatgaaggatgatgaagagcggttgatcattaattcagtcctccaagaagttttggccaaatacgaccttttggccaagcaaaagcaaatctccattgtgaatgacctagaggaccaaaccatggtcattggccgtccagccttgaaaattatcttgtccaatcttatcagcaatgccatcaagtatagcccaaaccagggtcagatttctattggtgtgaccgacgggaatttctatgtggccaacaggtctcatgacccaagtcgacttgacttggaccgggcttttaagatcaactttagcttggaccaagataccagcaatggcctaggcctttatatcgtctctaatttgttgtcaaattacggctttaactatcaactgacccaagaaaaagaccaggtcatcttcaagattgaattataa

SEQ ID NO: 5894 - protein, 306 aa, Alloiococcus otitidis
MQREARDLSLQFLPYSLALSLLISILLALLYAQVTKRQIQEIKDITDRMMDLDRAAWLKVDSSNEVGQLKDQINDLYRSLLQTIDDLEDKNEEIIKLENLRYDFFRGTSHELKTPLASLKVVLENMQYNIGKYKDRDKYIGKSIALVDDLTQHISQLLSISSLDHMKDDEERLIINSVLQEVLAKYDLLAKQKQISIVNDLEDQTMVIGRPALKIILSNLISNAIKYSPNQGQISIGVTDGNFYVANRSHDPSRLDLDRAFKINFSLDQDTSNGLGLYIVSNLLSNYGFNYQLTQEKDQVIFKIEL

SEQ ID NO: 5895 - DNA, 1386 bp, Alloiococcus otitidis; identical to SEQ ID NO: 5893
  CDS (73)..(1383)

SEQ ID NO: 5896 - protein, 437 aa, Alloiococcus otitidis
MKNLKLFPKMFLQIFAILSVLILAIHLFVFFAFPKSYLASRQEEIVSQADQIADQLEGQDLDYVQASLDFYSKTNDIRASLKEGGGENELAIQDGVGVDLTSENNSLIIEERPLDLADGGQRTLQFVSTADMQREARDLSLQFLPYSLALSLLISILLALLYAQVTKRQIQEIKDITDRMMDLDRAAWLKVDSSNEVGQLKDQINDLYRSLLQTIDDLEDKNEEIIKLENLRYDFFRGTSHELKTPLASLKVVLENMQYNIGKYKDRDKYIGKSIALVDDLTQHISQLLSISSLDHMKDDEERLIINSVLQEVLAKYDLLAKQKQISIVNDLEDQTMVIGRPALKIILSNLISNAIKYSPNQGQISIGVTDGNFYVANRSHDPSRLDLDRAFKINFSLDQDTSNGLGLYIVSNLLSNYGFNYQLTQEKDQVIFKIEL

SEQ ID NO: 5897 - DNA, 669 bp, Alloiococcus otitidis
  CDS (13)..(666)
aggagcagagcaatgaagatacttcttgtcgaagatgaccaattgattcgggagggtttggcagaatacttggcagaatttggctatcaagtggtccaagctaaagatggtcaagaagccttgaaatgcttccaagctaccagcgtccacttggtgattttggacatccaaattccctttttaaatggtttggcagtcttaaaggaaattcgtcgccagaacgatctccctgttttaatgttgacggcctttcatgatgaagaatacaagattgatgcctattctagcctggcagatgggtacattgaaaagcctttttccctgccagtcttaaaagcccgggttgatgccttgatcaagaaagagtacggtcagagtcaactgttcacctataaagattgccaggttaactttactagctattcagcccagcttggagggaaccctgtggcggttaacgctaaagaaatggaaatccttaaattcttggtagacaatgaggggcgggccttaagtcggtcccagattattgatcaagtgtggaaggagactgatgacatcccttatgaccgggtggtggatgtttatattaaagaattacggaaaaaattgaacttggactgtattgtcaccatccgcaatgtgggctacaagttggagcgaaaatga

SEQ ID NO: 5898 - protein, 218 aa, Alloiococcus otitidis
MKILLVEDDQLIREGLAEYLAEFGYQVVQAKDGQEALKCFQATSVHLVILDIQIPFLNGLAVLKEIRRQNDLPVLMLTAFHDEEYKIDAYSSLADGYIEKPFSLPVLKARVDALIKKEYGQSQLFTYKDCQVNFTSYSAQLGGNPVAVNAKEMEILKFLVDNEGRALSRSQIIDQVWKETDDIPYDRVVDVYIKELRKKLNLDCIVTIRNVGYKLERK

SEQ ID NO: 5899 - DNA, 1419 bp, Alloiococcus otitidis
  CDS (1042)..(1416)
aaaattataccaaagccaaaacttaattcaggaggtttagacatggttaaaaatgcatttgcctatgtaacacggaagaaaattaaatccctcattattttactcattatgactgctatgtcagccctggctttaatttcttggtctatcaagggagctactgaccaagctgcaagagaaacttttgggaatatcactaatagttttaccatggaaatcaaccatcaagtcaatatgggaacccctcgtggtggaggtaatgtcaagggagaggacatccagaaaattgccaatgccaaagatattgcaggctatgtcaagcggattaacagtgtggctaacttggaggatttggacattgttcaaacagaccagaccctggccaatgaaacgccagaccgggctgaaaaatttggctcagctgtcatgttgactggggttaatgaatcagaccaggagacaaaattcgtctcaggagcttacaagctggttgaaggagaccacttgaccaaccaagataaaagccaagtcttaatgcacaaggacctggctgagaaaaataagttaaaagtgggcgacacattcaccctcaagtctaacctttatgatgctgataatgaaaaaggagcagatgagagggtggaagttaccatcaaaggactttttgacggccacaatgagggaggggtgacggccgcgcaagaattgtatgaaaacaccctagtcactgacatagacactgcggccaaggtttatggcaatacagaagaaaccgcggtttaccaggatgcaagcttttttgtcaagggagacaaagacttggaccaagtgatcaaggacctgggtcaattgaatattaactggcgggactacacattgataaagagtgcttccaactatccagctcttcaggcatccgtctccggtatttaccagctagccgaccaacttttggcagggtcactgatctttgctggcttgatccttgcccttcttcttttcttatggctgaatgcccgtaagaaggaagttgcgatctacttgtctttggggttctccaagcttcagttatttggtcagtttgcccttgaactcttcttccttgctttaccaggctttgccctatcaatctttttagcttctgctttaggtaaaaggattggaaatagtgttttacaaagggttacatccggtattgtagaaaatattgcccaagaatctgcagcgactggacttggtggaggagcagaagtagacggttttaacaagaccctgtctagcttaaatgttcaactatctggtcaagctatcgtgcttgttggaatcttactcctccttgttttggcaatggccctccttttatcatctttccctattttacaaaaagatccgaaagacctcctcgttgatgtcaaatag

SEQ ID NO: 5900 - protein, 125 aa, Alloiococcus otitidis
MSLGFSKLQLFGQFALELFFLALPGFALSIFLASALGKRIGNSVLQRVTSGIVENIAQESAATGLGGGAEVDGFNKTLSSLNVQLSGQAIVLVGILLLLVLAMALLLSSFPILQKDPKDLLVDVK

SEQ ID NO: 5901 - DNA, 1419 bp, Alloiococcus otitidis; identical to SEQ ID NO: 5899
  CDS (43)..(1416)

SEQ ID NO: 5902 - protein, 458 aa, Alloiococcus otitidis
MVKNAFAYVTRKKIKSLIILLIMTAMSALALISWSIKGATDQAARETFGNITNSFTMEINHQVNMGTPRGGGNVKGEDIQKIANAKDIAGYVKRINSVANLEDLDIVQTDQTLANETPDRAEKFGSAVMLTGVNESDQETKFVSGAYKLVEGDHLTNQDKSQVLMHKDLAEKNKLKVGDTFTLKSNLYDADNEKGADERVEVTIKGLFDGHNEGGVTAAQELYENTLVTDIDTAAKVYGNTEETAVYQDASFFVKGDKDLDQVIKDLGQLNINWRDYTLIKSASNYPALQASVSGIYQLADQLLAGSLIFAGLILALLLFLWLNARKKEVAIYLSLGFSKLQLFGQFALELFFLALPGFALSIFLASALGKRIGNSVLQRVTSGIVENIAQESAATGLGGGAEVDGFNKTLSSLNVQLSGQAIVLVGILLLLVLAMALLLSSFPILQKDPKDLLVDVK

SEQ ID NO: 5903 - DNA, 663 bp, Alloiococcus otitidis
  CDS (16)..(660)
gttaggagaaaaaagatgaaacttttagaaataaccaatctcacctaccgctacggtaaggaaaaagtcctatcgaacctacactacatttttgaacccggtcaattttacgctattattggcaagtctggttcaggcaaatcaaccttgctatccttattggcaggtttagacaagcctagttccggtcaagtcctgttccaagaggcagatatcagccaagaggggtataggagccaccgaaaaaataatatttccctagttttccaaaattacaatttgatcgactacctcaccccactggagaatgtccggctagtcaacaagcaagcatcaagtcagatattactggacttgggcttgagccaagaccaagtcaaacgcaatgttctcaaactctctggtggccagcaacagcgggtagccattggtcgggccttggcctctgaagcgccagttattttggcggacgagccaacaggaaacctagacgaagggacggcaacagacatcatttccctctttaaagacttggctcatggccgaaacaaatgcgtaattgtggtcacccacagcaaggaagtggcccaagctgctgaccatattctagaacttaaagataaaaaattataccaaagccaaaacttaattcaggaggtttag

SEQ ID NO: 5904 - protein, 215 aa, Alloiococcus otitidis
MKLLEITNLTYRYGKEKVLSNLHYIFEPGQFYAIIGKSGSGKSTLLSLLAGLDKPSSGQVLFQEADISQEGYRSHRKNNISLVFQNYNLIDYLTPLENVRLVNKQASSQILLDLGLSQDQVKRNVLKLSGGQQQRVAIGRALASEAPVILADEPTGNLDEGTATDIISLFKDLAHGRNKCVIVVTHSKEVAQAADHILELKDKKLYQSQNLIQEV

SEQ ID NO: 5905 - DNA, 1464 bp, Alloiococcus otitidis
  CDS (1072)..(1461)
ctttcatatttcccgcctaaaatgaaattagataaaaacaagggctggttgtccagcctagaaaggagcaaaaatatggttgaaaatgccttggcttatgtgatccggaaaaagtctcggaccttgatcatctttaccctcatatgcttggttttgtctgccttatatgcttgcttggctatcctccagtctagcgaccaggttcaagctagcctctatcaatcgtccaactcttctttaaccattaagggaaaggaggggggaggtcactttcaagtgggcgacttatcttggcttcaaggagacccgagtgttcaaagcctggtctaccaatatgagggtttagctcaaagcttggggagtcagccggtcactggtgaccaaaaggtaaaccgagatgatttagccagtgatttggaaaacttgctttccctccaagcgatcagtcaaacagaccgagatcccttgttcacttctggcgtttttactcttgtcaaaggtagggggatccaggagggggaccagcataaagccctagtccatcaagattttgcccaagccaacaagttagacttgggggacaagctaagtttgcaaatgctggatttggaaaatgatgaaactatggcaaaccctagtccagaaagcgagggcagtccgggaagccaggacaataaaaaacagggcccagaagacgaggaaagtctagaaagaccgagcaatgaaaagtttgatccggaaagccaggaaagtttggaaagtcaggaatatgaaatcgtgggtattttttcgggtaaaaagcaggaaaactacacgggcctgtcttctgacttgagtgagaatatggtctataccgactacgcctctagccagactgcccttcacttaaaggggagtaaacaagaagtcagccaaattgccgtttttgcaaaagggcccgaccaattagataaaatttctaaaaaattagatgaaatggggggtgcaccagctaagtttcgggtagaggagaacacagaggcctatgaaacagcccaggcttccttagctggaattcgccagattatacaggtgatgaccttggccatcttaattgcgggagctcttgccctctcccttatcttaatcttatggttacgtgaacgaatatatgaaattggcgtcctcttaacgattggctttagcaaattacaagttatcggccaatttatcctagaactcatcctggtctctttgccaggcctcctgatctctttcttactgggtcgaatgcttttaaaccaagtcctaggtcaagtcttatcagtccctttactccaaacagactttggcttaaagcagaacctcctcatcttgggccaaagttatggtattttacttcttattattgtcttatctgtttttgtagcatccgctatgattttagtcaaaaaaccaaaggcgatcttatcgcaaatgagttag

SEQ ID NO: 5906 - protein, 130 aa, Alloiococcus otitidis
MMTLAILIAGALALSLILILWLRERIYEIGVLLTIGFSKLQVIGQFILELILVSLPGLLISFLLGRMLLNQVLGQVLSVPLLQTDFGLKQNLLILGQSYGILLLIIVLSVFVASAMILVKKPKAILSQMS

SEQ ID NO: 5907 - DNA, 1464 bp, Alloiococcus otitidis; identical to SEQ ID NO: 5905
  CDS (277)..(1461)

SEQ ID NO: 5908 - protein, 395 aa, Alloiococcus otitidis
MGDLSWLQGDPSVQSLVYQYEGLAQSLGSQPVTGDQKVNRDDLASDLENLLSLQAISQTDRDPLFTSGVFTLVKGRGIQEGDQHKALVHQDFAQANKLDLGDKLSLQMLDLENDETMANPSPESEGSPGSQDNKKQGPEDEESLERPSNEKFDPESQESLESQEYEIVGIFSGKKQENYTGLSSDLSENMVYTDYASSQTALHLKGSKQEVSQIAVFAKGPDQLDKISKKLDEMGGAPAKFRVEENTEAYETAQASLAGIRQIIQVMTLAILIAGALALSLILILWLRERIYEIGVLLTIGFSKLQVIGQFILELILVSLPGLLISFLLGRMLLNQVLGQVLSVPLLQTDFGLKQNLLILGQSYGILLLIIVLSVFVASAMILVKKPKAILSQMS

SEQ ID NO: 5909 - DNA, 1464 bp, Alloiococcus otitidis; identical to SEQ ID NO: 5905
  CDS (76)..(1461)

SEQ ID NO: 5910 - protein, 462 aa, Alloiococcus otitidis
MVENALAYVIRKKSRTLIIFTLICLVLSALYACLAILQSSDQVQASLYQSSNSSLTIKGKEGGGHFQVGDLSWLQGDPSVQSLVYQYEGLAQSLGSQPVTGDQKVNRDDLASDLENLLSLQAISQTDRDPLFTSGVFTLVKGRGIQEGDQHKALVHQDFAQANKLDLGDKLSLQMLDLENDETMANPSPESEGSPGSQDNKKQGPEDEESLERPSNEKFDPESQESLESQEYEIVGIFSGKKQENYTGLSSDLSENMVYTDYASSQTALHLKGSKQEVSQIAVFAKGPDQLDKISKKLDEMGGAPAKFRVEENTEAYETAQASLAGIRQIIQVMTLAILIAGALALSLILILWLRERIYEIGVLLTIGFSKLQVIGQFILELILVSLPGLLISFLLGRMLLNQVLGQVLSVPLLQTDFGLKQNLLILGQSYGILLLIIVLSVFVASAMILVKKPKAILSQMS

SEQ ID NO: 5911 - DNA, 1464 bp, Alloiococcus otitidis; identical to SEQ ID NO: 5905
  CDS (22)..(1461)

SEQ ID NO: 5912 - protein, 480 aa, Alloiococcus otitidis
MKLDKNKGWLSSLERSKNMVENALAYVIRKKSRTLIIFTLICLVLSALYACLAILQSSDQVQASLYQSSNSSLTIKGKEGGGHFQVGDLSWLQGDPSVQSLVYQYEGLAQSLGSQPVTGDQKVNRDDLASDLENLLSLQAISQTDRDPLFTSGVFTLVKGRGIQEGDQHKALVHQDFAQANKLDLGDKLSLQMLDLENDETMANPSPESEGSPGSQDNKKQGPEDEESLERPSNEKFDPESQESLESQEYEIVGIFSGKKQENYTGLSSDLSENMVYTDYASSQTALHLKGSKQEVSQIAVFAKGPDQLDKISKKLDEMGGAPAKFRVEENTEAYETAQASLAGIRQIIQVMTLAILIAGALALSLILILWLRERIYEIGVLLTIGFSKLQVIGQFILELILVSLPGLLISFLLGRMLLNQVLGQVLSVPLLQTDFGLKQNLLILGQSYGILLLIIVLSVFVASAMILVKKPKAILSQMS

SEQ ID NO: 5913 - DNA, 1659 bp, Alloiococcus otitidis
  CDS (58)..(1656)
cagacgacccgcccagtaagagagggtaaaatcctctctgagacgaggaggatttttatgctaaacatgaatcatttgagcaaatctattgctgatcgaaatttatttcatcttgaccacttgtctataagtgaccaagacaaggtaggcttgataggaaataatggagcagggaagactagttttttaaaaattctagctgggatagacccagactatgagggacagctagacatttcaactaaattggcctggctgatgaatgatgagaccaaggatttggatttttctggcgagacctactctagggctcaattggaccctgatgaaagtttaagccctggccagtaccagcgtttaaagctaactagtctcttaaaagaccaagaggcttttctcttaattgatgagccgacttcccacctggatattgaccagaaagaaaagctagctagcaggttgaaagctcggaagaaggggtatgtgatggtatcccatgaccgcgactttatcaacaaaacatgcaataagattatggagctttcggctgggaaatttgaattatacaatggtaattatcaattttaccttgaagaaaggctcagaaggcagaagttcaaggaaagagaatatgataagtatgtcaaagagaaaactcggttagaaaatttaacccaagagattgaagaccagtcggcaaatgtccgaaagactcctaatcgtatggggaattctgaagctagactccacaagatgggtggccagcagaataaaaagaaactagacaagcaagccaaagcggtccagtctcggctgaatcagttagatgttaaggaaaaacctgaaaaagaccaggacatccaattgaccatacctgaacaggataagatccaatcaaaaactctcataaaatcccaagagctgaccaagcgatttggtcagaaagtgatttttgaccaggccaaactagagattgctaatggtcgcaaatgggccttgatcggagacaatgggtccggtaaaacgaccttgcttaaaatgatcttaaacaaggaagtttatgtccatcctaagttgaaagttggctattacagccaattgtctggcactcttgacttggaaaagtcagtgctagctaatgtagaagaaacttccatttatgacgaaagcttgacaaggatcgtcttagcccggctaacttttaaaggagaccaagtttcaaaaaaagtagctaacttgagtgatggcgaaaaagccaaggtaaaattagctaagttagtgaccggagacttcaatttcttaatgatggatgagccgtgcaactatctagatattggaaccattgaagccttggaaagcttactagtaaattatgaccgccccctcctgtttgttagtcacgatgtctcttttatcaataaagtagccactgacttactcttgatcgaagaccaaaagataaagaccttcccaggcaacttggctcagtaccaaaaggaaaagcaaaaaccaagtccagatgatgaaagcgacttacgtcttgattttcgcctgacttccatcaataaccgcttagcagccatggaattgacaagcgaggaaagggaagaactagagaaggaatttgaccgtttaatggaattaaaaagatcccgataa

SEQ ID NO: 5914 - protein, 533 aa, Alloiococcus otitidis
MLNMNHLSKSIADRNLFHLDHLSISDQDKVGLIGNNGAGKTSFLKILAGIDPDYEGQLDISTKLAWLMNDETKDLDFSGETYSRAQLDPDESLSPGQYQRLKLTSLLKDQEAFLLIDEPTSHLDIDQKEKLASRLKARKKGYVMVSHDRDFINKTCNKIMELSAGKFELYNGNYQFYLEERLRRQKFKEREYDKYVKEKTRLENLTQEIEDQSANVRKTPNRMGNSEARLHKMGGQQNKKKLDKQAKAVQSRLNQLDVKEKPEKDQDIQLTIPEQDKIQSKTLIKSQELTKRFGQKVIFDQAKLEIANGRKWALIGDNGSGKTTLLKMILNKEVYVHPKLKVGYYSQLSGTLDLEKSVLANVEETSIYDESLTRIVLARLTFKGDQVSKKVANLSDGEKAKVKLAKLVTGDFNFLMMDEPCNYLDIGTIEALESLLVNYDRPLLFVSHDVSFINKVATDLLLIEDQKIKTFPGNLAQYQKEKQKPSPDDESDLRLDFRLTSINNRLAAMELTSEEREELEKEFDRLMELKRSR

SEQ ID NO: 5915 - DNA, 885 bp, Alloiococcus otitidis
  CDS (4)..(882)
actatggaagatacaattcagattgccattgttggcctgggggttatcggcgggtcttttgcctgggccttgaaggagcaagaagattttccggttaagctgatgggaattgaccgggatggccgaaccctcgaccaagcacttgcagctggggtcattgaccggggggagttagccaaccgggagatcttgcaacaagctgacctggtcatcatcaccctctaccctgatgacttggttgcctttgtcaaagaccaccgggattcttttaaggcgggggcgattgtaactgacgtaactggggtcaaggggagagtggtagaagaggtggtggcgattttaccagaggaagtcgactttatctttggccaccccatggccggtcgggaaagccaaggctttgcctatgctgacaagacggtctttgaccaagccaactatttactaaccccaagacccgctaacaagccagaaaacgtccactttttgacccagctcttaacagctcttggcttcaaaagtgttcgccaggtggactaccaaacccatgaccggatggtggcctatgtgagccagctctgccacatcctagccatttccctaattaacagtgaccaagctggacaggagacagccgactttatgggggactcctaccgcgacctgacccggatcgccaatatcaatgcccccctttggcagcaactcttcctccataataaagaagccctcctgagggccatggccaacttccaagaccagtttgacctgttgaaaaaggcgttggaggatgaagaccaagcaagtttaatgaccctgctagaagaaggggccaagcgccggcttgcattggagaagatggactttaaagttcaaaataattag

SEQ ID NO: 5916 - protein, 293 aa, Alloiococcus otitidis
MEDTIQIAIVGLGVIGGSFAWALKEQEDFPVKLMGIDRDGRTLDQALAAGVIDRGELANREILQQADLVIITLYPDDLVAFVKDHRDSFKAGAIVTDVTGVKGRVVEEVVAILPEEVDFIFGHPMAGRESQGFAYADKTVFDQANYLLTPRPANKPENVHFLTQLLTALGFKSVRQVDYQTHDRMVAYVSQLCHILAISLINSDQAGQETADFMGDSYRDLTRIANINAPLWQQLFLHNKEALLRAMANFQDQFDLLKKALEDEDQASLMTLLEEGAKRRLALEKMDFKVQNN

SEQ ID NO: 5917 - DNA, 933 bp, Alloiococcus otitidis
  CDS (52)..(930)
acggacagcggcttttatcaaaggcctcaaggtttagaaagtaggaaagttatgaaaattgcttatcaaggcattgcaggatcgtattctgaaaccgtgattcaaacttacttaaaggaaggagtcgaggaaagtggccaggctgaagtggttccttgtttgaacttccccgaagttttggaccggttgacgagggaccaggttgacttgggtgttttcccggttgaaaactccaccactggcttgatcacccggaccctagacttgtttaagggccgggacatctttgtggaagaagagcgctaccaacctgttcgtcataccttgtggggcctgccggagtcaagtttgaaccaggtccgccaggtttactcccatccggaagccttgtcccaatgtcaatccttttttgaggcccatccacaaattgaaccggttccctttaccgatacagctcaggcggcatggtatatccatgatcaaggagaccccaagaaggctgccttggctggtccgcaaaatggtgaactctaccagcttgttcctcttttggaccatatccaaacagaagagaccaataccactcgttttttcctagccaagcactggtcaaagacaccactggacttagaccaggaattagaggactattttaagcaatatcctagccgaacccggtggatgatttatgtggaaaccaagcaccagccaggctctttggttcgtttgctcaatatttttgacctttttgattgcaacctagaaggactggatgccagacccattgccaaccagcctttccgttacgggttctttatcgaggtggatgttagcaatctggggggagactaccaactcttgtggcaaaacttagcctttgccagtgaatatatccaaatcattggggccttccaaccccttgctattgactaa

SEQ ID NO: 5918 - protein, 293 aa, Alloiococcus otitidis
MKIAYQGIAGSYSETVIQTYLKEGVEESGQAEVVPCLNFPEVLDRLTRDQVDLGVFPVENSTTGLITRTLDLFKGRDIFVEEERYQPVRHTLWGLPESSLNQVRQVYSHPEALSQCQSFFEAHPQIEPVPFTDTAQAAWYIHDQGDPKKAALAGPQNGELYQLVPLLDHIQTEETNTTRFFLAKHWSKTPLDLDQELEDYFKQYPSRTRWMIYVETKHQPGSLVRLLNIFDLFDCNLEGLDARPIANQPFRYGFFIEVDVSNLGGDYQLLWQNLAFASEYIQIIGAFQPLAID

SEQ ID NO: 5919 - DNA, 762 bp, Alloiococcus otitidis
  CDS (28)..(759)
acagtaaaaaagcataggagggaaagtatgttacgactatcgaattggaacaagtcttttggcaaccaccaagtcttaaaagatatccacttggaggtagccactggggatgttttaaccatcatcgggtcatctgggtctggcaagtccaccttgcttcggaccattaacttcttggagccggctgataatgggacaattgaaatggctgaccaagcctatgatattgaagctattagtcaagcagacctcttaaagatccggcggcaaacagccatggtttttcaaaattatgctcttttctctaaaaagacggccttggaaaatgttatggaaagcctgattatggttcaaaaacggtccaaaaaagtggccaagaacctagcccgctactacctcaaccaggtggggatgggggaccgggaagactactacccctctcacctgtcgggcggccagcaacagcgggtgggcattgcccgggccttggccatccagcctgaggtcatcttgtttgatgaacccacctctgccttagaccctgagttggtcgccggtatcctagatttgatccagtcaattgcccatggggataccaccatggtcttggttacccatgaaatgaattttgccaaggaggtctctgaccaggtttgcttcttagaaaaggggatcattatcgaacaagggccacctggtcagatttttgaccaggccaagagtgaacggacagcggcttttatcaaaggcctcaaggtttag

SEQ ID NO: 5920 - protein, 244 aa, Alloiococcus otitidis
MLRLSNWNKSFGNHQVLKDIHLEVATGDVLTIIGSSGSGKSTLLRTINFLEPADNGTIEMADQAYDIEAISQADLLKIRRQTAMVFQNYALFSKKTALENVMESLIMVQKRSKKVAKNLARYYLNQVGMGDREDYYPSHLSGGQQQRVGIARALAIQPEVILFDEPTSALDPELVAGILDLIQSIAHGDTTMVLVTHEMNFAKEVSDQVCFLEKGIIIEQGPPGQIFDQAKSERTAAFIKGLKV

SEQ ID NO: 5921 - DNA, 1770 bp, Alloiococcus otitidis
  CDS (1465)..(1767)
gtgttttttatttattccaaaggagcaacttgctacaattggagggtatatgggatgaaaaaaagattcgtatcgctagtattggtcttgcttggcttactctgcttcactaggtcaagctcagtcacgcaaagggtagaagcaaggggttcggagtcggccatttcggatgaagtggatttggcggagggggaagagcctcgtcaggttgtggtagggactacgggacagaccaaacctctcaactacttcgacgataataatgaattgaccggcttggaaattgatattttagatgaaatagaccagcgtttggaggaaattgagattacatatgagattactgaattcccttccctctttgctggcttggattcagggaaatttgacctggtggccaacaacttgggtgaaaatgaggaacggcgggacaagtatctcttctccctctacccttatgttatcacccacaatgttataatcacggacacggaccagccggctaatctagacttggaagacttagcaggtcagtctttcggggtagttccggcctcgccccagtccatgtttttagaaagttggaacgagcagaacccagacttggcggtggatatccagtatgtcgattcggacccgtctaccattatccgggacgtttacaacggccgctttgatgctacgatttacaagaccatttatttacaggatgtccaggatacttttgggattgaactccagtctcaccctattgaagatgaagaagccatccagccaccagggtcttactttatttaccaagaccaagatgaagacttaagaaatttaatggacacagtcctggcggagatgcgtgaggagggtaggctggctgaactgagcttagtctacctgggccaagatgataccgaactcagcccggaaataattgcaaaaaatgatgccatcgaggccgaaagacagcaagaaggccaggttgaccctgatcaagaaagggaagaccaagatcagccagaagctgcaagtggtaagatctttgccccagaagccattatccaaatgctaccagatattttggcaagactacccattactgttttgatgacccttgtagcaggggtcatcggtcttgctctaggcttcttgctggcggtaattcggctgaaagaagttcccgtggtcaatcaattgctccaggtttttatttcctttatgcgggggacaccccaactcgtccaactctttttagccttttatggcttccccttggtggtggaatggctcaaccagcaagcgggctggaacttagatgtcaatggaataccagccttggtctatgtttttgtggcttttggcttgaatgaagcggcttacaattccgaaacttttcgggcagctatcctatcagttgacaacaaggaaattgaagcggccaagtcgattggtttaaccgatcggcagaccatgcggcggatcatcctgccctctgccctagtcgttgccatccccaatttgggaaacagcttgattagtttattgaaagggacctctttagcctttaccgtaactgtgattgatatcatgggccaagctcggattttagccggtgctaaccttcgtttctttgaagcctatattgctgtagccctcctctactggctcttttgtattttaatcgagcgcggggtcggctacttagagcgacgactgaatataccagaccggccaagccaaaagcaagtgcccaagctagacagtaaaaaagcatag

SEQ ID NO: 5922 - protein, 101 aa, Alloiococcus otitidis
MRRIILPSALVVAIPNLGNSLISLLKGTSLAFTVTVIDIMGQARILAGANLRFFEAYIAVALLYWLFCILIERGVGYLERRLNIPDRPSQKQVPKLDSKKA

SEQ ID NO: 5923 - DNA, 1770 bp, Alloiococcus otitidis; identical to SEQ ID NO: 5921
  CDS (1060)..(1767)

SEQ ID NO: 5924 - protein, 236 aa, Alloiococcus otitidis
MLPDILARLPITVLMTLVAGVIGLALGFLLAVIRLKEVPVVNQLLQVFISFMRGTPQLVQLFLAFYGFPLVVEWLNQQAGWNLDVNGIPALVYVFVAFGLNEAAYNSETFRAAILSVDNKEIEAAKSIGLTDRQTMRRIILPSALVVAIPNLGNSLISLLKGTSLAFTVTVIDIMGQARILAGANLRFFEAYIAVALLYWLFCILIERGVGYLERRLNIPDRPSQKQVPKLDSKKA

SEQ ID NO: 5925 - DNA, 1770 bp, Alloiococcus otitidis; identical to SEQ ID NO: 5921
  CDS (175)..(1767)

SEQ ID NO: 5926 - protein, 531 aa, Alloiococcus otitidis
MDLAEGEEPRQVVVGTTGQTKPLNYFDDNNELTGLEIDILDEIDQRLEEIEITYEITEFPSLFAGLDSGKFDLVANNLGENEERRDKYLFSLYPYVITHNVIITDTDQPANLDLEDLAGQSFGVVPASPQSMFLESWNEQNPDLAVDIQYVDSDPSTIIRDVYNGRFDATIYKTIYLQDVQDTFGIELQSHPIEDEEAIQPPGSYFIYQDQDEDLRNLMDTVLAEMREEGRLAELSLVYLGQDDTELSPEIIAKNDAIEAERQQEGQVDPDQEREDQDQPEAASGKIFAPEAIIQMLPDILARLPITVLMTLVAGVIGLALGFLLAVIRLKEVPVVNQLLQVFISFMRGTPQLVQLFLAFYGFPLVVEWLNQQAGWNLDVNGIPALVYVFVAFGLNEAAYNSETFRAAILSVDNKEIEAAKSIGLTDRQTMRRIILPSALVVAIPNLGNSLISLLKGTSLAFTVTVIDIMGQARILAGANLRFFEAYIAVALLYWLFCILIERGVGYLERRLNIPDRPSQKQVPKLDSKKA

SEQ ID NO: 5927 - DNA, 1770 bp, Alloiococcus otitidis; identical to SEQ ID NO: 5921
  CDS (55)..(1767)

SEQ ID NO: 5928 - protein, 571 aa, Alloiococcus otitidis
MKKRFVSLVLVLLGLLCFTRSSSVTQRVEARGSESAISDEVDLAEGEEPRQVVVGTTGQTKPLNYFDDNNELTGLEIDILDEIDQRLEEIEITYEITEFPSLFAGLDSGKFDLVANNLGENEERRDKYLFSLYPYVITHNVIITDTDQPANLDLEDLAGQSFGVVPASPQSMFLESWNEQNPDLAVDIQYVDSDPSTIIRDVYNGRFDATIYKTIYLQDVQDTFGIELQSHPIEDEEAIQPPGSYFIYQDQDEDLRNLMDTVLAEMREEGRLAELSLVYLGQDDTELSPEIIAKNDAIEAERQQEGQVDPDQEREDQDQPEAASGKIFAPEAIIQMLPDILARLPITVLMTLVAGVIGLALGFLLAVIRLKEVPVVNQLLQVFISFMRGTPQLVQLFLAFYGFPLVVEWLNQQAGWNLDVNGIPALVYVFVAFGLNEAAYNSETFRAAILSVDNKEIEAAKSIGLTDRQTMRRIILPSALVVAIPNLGNSLISLLKGTSLAFTVTVIDIMGQARILAGANLRFFEAYIAVALLYWLFCILIERGVGYLERRLNIPDRPSQKQVPKLDSKKA

SEQ ID NO: 5929 - DNA, 1770 bp, Alloiococcus otitidis; identical to SEQ ID NO: 5921
  CDS (1)..(1767)

SEQ ID NO: 5930 - protein, 589 aa, Alloiococcus otitidis
MFFIYSKGATCYNWRVYGMKKRFVSLVLVLLGLLCFTRSSSVTQRVEARGSESAISDEVDLAEGEEPRQVVVGTTGQTKPLNYFDDNNELTGLEIDILDEIDQRLEEIEITYEITEFPSLFAGLDSGKFDLVANNLGENEERRDKYLFSLYPYVITHNVIITDTDQPANLDLEDLAGQSFGVVPASPQSMFLESWNEQNPDLAVDIQYVDSDPSTIIRDVYNGRFDATIYKTIYLQDVQDTFGIELQSHPIEDEEAIQPPGSYFIYQDQDEDLRNLMDTVLAEMREEGRLAELSLVYLGQDDTELSPEIIAKNDAIEAERQQEGQVDPDQEREDQDQPEAASGKIFAPEAIIQMLPDILARLPITVLMTLVAGVIGLALGFLLAVIRLKEVPVVNQLLQVFISFMRGTPQLVQLFLAFYGFPLVVEWLNQQAGWNLDVNGIPALVYVFVAFGLNEAAYNSETFRAAILSVDNKEIEAAKSIGLTDRQTMRRIILPSALVVAIPNLGNSLISLLKGTSLAFTVTVIDIMGQARILAGANLRFFEAYIAVALLYWLFCILIERGVGYLERRLNIPDRPSQKQVPKLDSKKA

SEQ ID NO: 5931 - DNA, 531 bp, Alloiococcus otitidis
  CDS (25)..(528)
tcttattttgaaaaggagaccaatatgaagctaaccactgaccgactcactcttcgcccttttaaccaaggggacctggctgatgtttttgaattctattccaatgaccaggtctgtcaatacctcttggaagatccttggcaagaccaagacagggaagagaaatttcaagaaaaactgaataaccataacttggacaaggagtctgctttgaatttagccgtcctattagacaatacagtaatcggcgatatctccgtatggtataccgacaagaaagacacggttgagcttggctatgtttttaaccctcctattccgggcagggctatgctagggaggcagttcgagcagtcattatggaactcttttctaccttccaagttcaccgcatccaagctaacttggatgctcgcaacacagcttcagcaaacttatgtcagaaacttggtatgcgaagggaagcccactttttgcaagatttttggaacaaaggcgaatggacagatagttatgtttacgggatgctag

SEQ ID NO: 5932 - protein, 168 aa, Alloiococcus otitidis
MKLTTDRLTLRPFNQGDLADVFEFYSNDQVCQYLLEDPWQDQDREEKFQEKLNNHNLDKESALNLAVLLDNTVIGDISVWYTDKKDTVELGYVFNPPIPGRAMLGRQFEQSLWNSFLPSKFTASKLTWMLATQLQQTYVRNLVCEGKPTFCKIFGTKANGQIVMFTGC

SEQ ID NO: 5933 - DNA, 798 bp, Alloiococcus otitidis
  CDS (10)..(795)
agggaggaaatgaatatgacacagaagactgctgttgtaacaggttcagcacagggaattgggaaagcgattgcagaacgtttggcttcagatggttttaaagttgttgtgtcagatatcgatgaagagaagttacaagaagcatatgaagaattgaaggacaaaggctatgaagtagcagcaaaagttgctgacacggccaaaaatcaagaccatgttgatttagtggattatgctgttgatacatttggatcagttgatgtttatgtgaataatgctggtataggtggcaagttgggacagttgattgatacaagtgaagactaccttgatcaaattattagtattaatgtgaaaggtgtcttttttggaatcaaagcagctgccaagcaaatgatcaagcaaggtaagggtggacggattatcaatgcctctagtgtagcaggtgaggaaggccaagaattacttggtgtttactctgtgactaaatttgcggttcgcggtcttactcaggtcgcttctaaggaacttgctgaacaccaaattaccgtaaactcttacaacccaggctttgttggaactggtcttttagatcaagcggtagaagcctttaaagcatcgtcggacgaaaaactatcggatcaagagattatcgattcatatattgacctcatcggtcttggtagactcggcgaacctaaagatatcgctaacgtggtttcattcattgcttctgaagattcggcctacatgacgggtcaatcctttattgctgatggtggagtccgttacccataa

SEQ ID NO: 5934 - protein, 262 aa, Alloiococcus otitidis
MNMTQKTAVVTGSAQGIGKAIAERLASDGFKVVVSDIDEEKLQEAYEELKDKGYEVAAKVADTAKNQDHVDLVDYAVDTFGSVDVYVNNAGIGGKLGQLIDTSEDYLDQIISINVKGVFFGIKAAAKQMIKQGKGGRIINASSVAGEEGQELLGVYSVTKFAVRGLTQVASKELAEHQITVNSYNPGFVGTGLLDQAVEAFKASSDEKLSDQEIIDSYIDLIGLGRLGEPKDIANVVSFIASEDSAYMTGQSFIADGGVRYP

SEQ ID NO: 5935 - DNA, 735 bp, Alloiococcus otitidis
  CDS (25)..(732)
atagtggatggaaggagtagaaaaatgggagaacataccattgaaatatatgcagatggagcagatattgaacagatgaaacatacctataaagatgggaaaatttgtggttttacaactaatccatcactgatgaagaaggcaaatgtttctaattatacaagttttgtagaagaagtagtgaatacatttcctgacacacctatttcttttgaagtattctctgatgattttgttcaaatgaaaaaagaagcaatcaagctaacttcatttggcgacaatatttttgttaagattccgattatgaattcaaaaggtgaatccagtattccgctcatacgagaattatccaatcaaggaattaaattaaatgtaacggcagtattcactattgaacaggttaaagatatagtgtctgcattaaacgaaaatactgagagtattgtatcagtattcgcgggtagaatagctgatactggtgtagatccactaggaataatggaagaatctgctgaactgtgtcatagtaaaaacaatgtaaaattgctttgggcaagtcctagagaagttttaaacatagttcaagctaataaagtaggtgctgatataatcacttgtacacatgaattaattggcaagatggataattttgggaaagacctgacccaatattcgaaagaaacagtacagatgttcttagaagacagtcaatcgttaaattacagtattctgtag

SEQ ID NO: 5936 - protein, 236 aa, Alloiococcus otitidis
MGEHTIEIYADGADIEQMKHTYKDGKICGFTTNPSLMKKANVSNYTSFVEEVVNTFPDTPISFEVFSDDFVQMKKEAIKLTSFGDNIFVKIPIMNSKGESSIPLIRELSNQGIKLNVTAVFTIEQVKDIVSALNENTESIVSVFAGRIADTGVDPLGIMEESAELCHSKNNVKLLWASPREVLNIVQANKVGADIITCTHELIGKMDNFGKDLTQYSKETVQMFLEDSQSLNYSIL

SEQ ID NO: 5937 - DNA, 735 bp, Alloiococcus otitidis; identical to SEQ ID NO: 5935
  CDS (4)..(732)

SEQ ID NO: 5938 - protein, 243 aa, Alloiococcus otitidis
MDGRSRKMGEHTIEIYADGADIEQMKHTYKDGKICGFTTNPSLMKKANVSNYTSFVEEVVNTFPDTPISFEVFSDDFVQMKKEAIKLTSFGDNIFVKIPIMNSKGESSIPLIRELSNQGIKLNVTAVFTIEQVKDIVSALNENTESIVSVFAGRIADTGVDPLGIMEESAELCHSKNNVKLLWASPREVLNIVQANKVGADIITCTHELIGKMDNFGKDLTQYSKETVQMFLEDSQSLNYSIL

SEQ ID NO: 5939 - DNA, 1392 bp, Alloiococcus otitidis
  CDS (1012)..(1389)
cagaagaatggaggaaagccaatggcatctgttttaaactttttacaagatatattaactgaaccagcttttctaattggtttaatgtcttttgtcggtctaatagctttaagagctaagcctcataaaatattgacaggaactttaggacctattattggttatttgatgctggatgctggtgctagtgttattgtttcaaatttagacccgctggcccaaatgatcgaagctggattcaatataaccggggtcgtacctaacaatgaggcagttgtatcagtagcccaagagttgttaggtgtggagacaatgtcaattttagttgtaggaatggcagctaatttgattattgctagatttacccattataagtatattttcttaacaggtcaccatagcttcttcatggcttgcctattatcagcagttatgggggccatggggattgttggctgggagttagtgttgcttggtggatttttcttgggtgcgtggagtgcactttcaccagctataggacaaaaattaactctccaagtgacagatggtgacgatattgcaatgggacactttagctccgttgggtattatctttctgggttgattggtaaattgattggaaaaaatagtaagtctacagaagatattgaagtaccagaacgttggtccttccttagaaatactactatttctacagctattacaatggtcatcttttatgttttagctgctgtcgtggccggacctgattttgtttctcaactatctggggatcaaaattacattatctttgcaatattgtctggtctaatgtttgcagtaggggtgtcgatcgtatatgctggtgtgcgaatgattttagccgatttgattccggcttttcaaggaatagcgactaaagtcattcctaatgctgttccagcggttgactgtgccgtattctttacttatgcacctacagcagtcatcattggttttgtctcttcttttgttggaggaattattggaatgctagtactcggagcactaggcggagttctcattatacctggcatggtccctcacttctttactggtgcgacagctggtatttatggtaatgcgactggtggcagaagaggcgcaatagtagggtcttttataaatggtttagctatatcttttatccctgctttgttacttcctgttttaggaaatttaggtttttcgaatacaacttttggggatactgattttggtgtagtagggattatacttgggcaaattggtaatttgtttaacagtataggaatatatattctagcggttattgtgttagtagttctctttttacctaattttatacgtaaatcaaacctggctataaataatgtggattatgatgaatag

SEQ ID NO: 5940 - protein, 126 aa, Alloiococcus otitidis
MLVLGALGGVLIIPGMVPHFFTGATAGIYGNATGGRRGAIVGSFINGLAISFIPALLLPVLGNLGFSNTTFGDTDFGVVGIILGQIGNLFNSIGIYILAVIVLVVLFLPNFIRKSNLAINNVDYDE

SEQ ID NO: 5941 - DNA, 1392 bp, Alloiococcus otitidis; identical to SEQ ID NO: 5939
  CDS (22)..(1389)

SEQ ID NO: 5942 - protein, 456 aa, Alloiococcus otitidis
MASVLNFLQDILTEPAFLIGLMSFVGLIALRAKPHKILTGTLGPIIGYLMLDAGASVIVSNLDPLAQMIEAGFNITGVVPNNEAVVSVAQELLGVETMSILVVGMAANLIIARFTHYKYIFLTGHHSFFMACLLSAVMGAMGIVGWELVLLGGFFLGAWSALSPAIGQKLTLQVTDGDDIAMGHFSSVGYYLSGLIGKLIGKNSKSTEDIEVPERWSFLRNTTISTAITMVIFYVLAAVVAGPDFVSQLSGDQNYIIFAILSGLMFAVGVSIVYAGVRMILADLIPAFQGIATKVIPNAVPAVDCAVFFTYAPTAVIIGFVSSFVGGIIGMLVLGALGGVLIIPGMVPHFFTGATAGIYGNATGGRRGAIVGSFINGLAISFIPALLLPVLGNLGFSNTTFGDTDFGVVGIILGQIGNLFNSIGIYILAVIVLVVLFLPNFIRKSNLAINNVDYDE

SEQ ID NO: 5943 - DNA, 303 bp, Alloiococcus otitidis
  CDS (22)..(300)
tcaaatggaaggagaataactatgttaaaagttattacagtttgtgggaatggtataggaagtagcctattgttaaaaatgaaattggaagaaatcgctaaagaagagggaataagtttagaagctgaatctgttgattcaggaaatgctcaaggcaaaaaagcagatttagtagtaacaattaaagagctcgctagtatatttccagatgaccaaccaattgcgatcatccgttcctacaccaataagaaaaaaattaaggaagatgtattacctgtactaaaaaaactagctgatagttaa

SEQ ID NO: 5944 - protein, 93 aa, Alloiococcus otitidis
MLKVITVCGNGIGSSLLLKMKLEEIAKEEGISLEAESVDSGNAQGKKADLVVTIKELASIFPDDQPIAIIRSYTNKKKIKEDVLPVLKKLADS

SEQ ID NO: 5945 - DNA, 2076 bp, Alloiococcus otitidis
  CDS (10)..(2073)
gtgataagcatgcttaagaaaacttctctttcactgttgcaaaagttagtaaatagcaaagaagagaatatcgaaaaactgatagttctgttaaataaaagccgtaagcaattttggtatgaacttcaagaattaaatagaggattgttgaatactggtttaaaagcgattgatcacgattccaaagagttatttatttcccaatccatgtacgaccagtttaataaaatagtggatgaatcttttatcgatttttaccagtatcaaagtgaaaggatttattttctctacttatatattgtgtgtaataaaggctatatatctagtatccatctacaggaatacttaggcttaagtagaaatgcaagcatgaaagagttaaaaaaattaagggagtggattggaaaagagggtttgtcaatcaattatagcaggactaacgggtatgaagtaacaggttatgaaaaagatatccgtagaatgatggaaatttgcatttgtaaactaaagaataaattccccttagataaagtctatttcacatttaaaaaagattggcaagatcacaaagttgttgaagcaataaataattatttgattgaattgagtcaaaaatatcatctaaatattcttcatgatagagcagaagaatttatttatcttttagcttttatgaagcaaagggacactcattcttctatagagtttaatgagtgggaaattcgtttactagacaaacactttatgcttaatttagccaaggaattagtaaatgatctcctaggagataataccaaaagtgaaatacatttttgggaaagtcggatgttaggtatatttttatttacaccaaatgatcaagataagaaattttttgaccgtcttacggaagagattttattaaaagcgaatacgatcatgggtgttaatttcattcaggatagtcagttgaaaatgaccctttgccagcacatcattccggctttttacagactggtctttgatatttattatgataatccgctgcttgaaaaaataaaagaagagtatgaagacctatttgaaataactagaaaaatattagagccacttgaaagtaaagtcaataatactatttccgaaagtgaaatagcttattttacgatccattttggcggctatttaagtagatattctcctaagattaaccttaaagcagcggttgtttgtccaaatggaataagttcgtccttaatcatgtcatcaactataaaaaatatatttccagatttgcagattactcaactgcatagtttacaagatttaacaaatagtacattgaaagatatagatatggtatttacgacaacttatttaacatgcgaaaaacctgtttttaccattagtcccattttgaacccaattgaacaggaggttttaagagagaaagttagctccgaattttctgaattatcaaaaccatattcagttaatagcagagatattctgaaaatagtagaaaagcatgcagctattgaagaccgaaattccttattaaaggaaatacaaaactatttatatagagaaagaggatcattatctcgtttaggggaagtgaagaatttgacagaaatatttgattcatcaatggtacagactgtcaaacatgttgatagttgggtggaagcaatcaaaaaagcttccgaaccattgctaaataaagagtatattgagaaagaatacgttgatgcaatgatagaaacagtaaataatattggaccgtatattgtgttagcaccacaagtggctgtcccccatgcaagacctgagagaggagtcaataagttagggatcagtttattaaaaatagaagatccagtggattttaatactgaacatgagaaagacccagaaaaatttgtgaacctagtatttgttttagcggctattgatggtgaagctcatttgaaagctttggttcaattgtccaaaatattagacaatgaagataatatcaaggagattatagaactagataatccaatagatatatatgaaaaaattgaaaacttggttaatcaaatggaaggagaataa

SEQ ID NO: 5946 - protein, 688 aa, Alloiococcus otitidis
MLKKTSLSLLQKLVNSKEENIEKLIVLLNKSRKQFWYELQELNRGLLNTGLKAIDHDSKELFISQSMYDQFNKIVDESFIDFYQYQSERIYFLYLYIVCNKGYISSIHLQEYLGLSRNASMKELKKLREWIGKEGLSINYSRTNGYEVTGYEKDIRRMMEICICKLKNKFPLDKVYFTFKKDWQDHKVVEAINNYLIELSQKYHLNILHDRAEEFIYLLAFMKQRDTHSSIEFNEWEIRLLDKHFMLNLAKELVNDLLGDNTKSEIHFWESRMLGIFLFTPNDQDKKFFDRLTEEILLKANTIMGVNFIQDSQLKMTLCQHIIPAFYRLVFDIYYDNPLLEKIKEEYEDLFEITRKILEPLESKVNNTISESEIAYFTIHFGGYLSRYSPKINLKAAVVCPNGISSSLIMSSTIKNIFPDLQITQLHSLQDLTNSTLKDIDMVFTTTYLTCEKPVFTISPILNPIEQEVLREKVSSEFSELSKPYSVNSRDILKIVEKHAAIEDRNSLLKEIQNYLYRERGSLSRLGEVKNLTEIFDSSMVQTVKHVDSWVEAIKKASEPLLNKEYIEKEYVDAMIETVNNIGPYIVLAPQVAVPHARPERGVNKLGISLLKIEDPVDFNTEHEKDPEKFVNLVFVLAAIDGEAHLKALVQLSKILDNEDNIKEIIELDNPIDIYEKIENLVNQMEGE

SEQ ID NO: 5947 - DNA, 2076 bp, Alloiococcus otitidis; identical to SEQ ID NO: 5945
  CDS (1)..(2073)

SEQ ID NO: 5948 - protein, 691 aa, Alloiococcus otitidis
MISMLKKTSLSLLQKLVNSKEENIEKLIVLLNKSRKQFWYELQELNRGLLNTGLKAIDHDSKELFISQSMYDQFNKIVDESFIDFYQYQSERIYFLYLYIVCNKGYISSIHLQEYLGLSRNASMKELKKLREWIGKEGLSINYSRTNGYEVTGYEKDIRRMMEICICKLKNKFPLDKVYFTFKKDWQDHKVVEAINNYLIELSQKYHLNILHDRAEEFIYLLAFMKQRDTHSSIEFNEWEIRLLDKHFMLNLAKELVNDLLGDNTKSEIHFWESRMLGIFLFTPNDQDKKFFDRLTEEILLKANTIMGVNFIQDSQLKMTLCQHIIPAFYRLVFDIYYDNPLLEKIKEEYEDLFEITRKILEPLESKVNNTISESEIAYFTIHFGGYLSRYSPKINLKAAVVCPNGISSSLIMSSTIKNIFPDLQITQLHSLQDLTNSTLKDIDMVFTTTYLTCEKPVFTISPILNPIEQEVLREKVSSEFSELSKPYSVNSRDILKIVEKHAAIEDRNSLLKEIQNYLYRERGSLSRLGEVKNLTEIFDSSMVQTVKHVDSWVEAIKKASEPLLNKEYIEKEYVDAMIETVNNIGPYIVLAPQVAVPHARPERGVNKLGISLLKIEDPVDFNTEHEKDPEKFVNLVFVLAAIDGEAHLKALVQLSKILDNEDNIKEIIELDNPIDIYEKIENLVNQMEGE

SEQ ID NO: 5949 - DNA, 516 bp, Alloiococcus otitidis
  CDS (94)..(513)
tcgacaaaaacaatgaatataaggagaattcacatgactcaagcccatgatagcacactttcccctaaaggaacacacttaactccagcggaaatgcataaaatcgaagcctataaggcagaaggctattccaatcggcagattgccaagctgctcggccgttgtccgcaaaccatccacaatgccatcaagaccggttctgtcccccaaaaacgccaacagaaacactatgggaaaacttacacctactatgacacgatctatttcgccgacgtccatgccaaggcctaccaagaccaccgccgtcattgtgggcgacggcccaaatgggtcgacaactccgcctttcttgactgggctgaccaaaagctcttgcaggagaaatggtcgcccgatgtggtggtccatcaagccaaagaagtctttgagcctggccagattcccagcacgtcaactttgtaccattggattgaccgcgagttgatgcgcacacggaatggggacttcctggagtaa

SEQ ID NO: 5950 - protein, 140 aa, Alloiococcus otitidis
MHKIEAYKAEGYSNRQIAKLLGRCPQTIHNAIKTGSVPQKRQQKHYGKTYTYYDTIYFADVHAKAYQDHRRHCGRRPKWVDNSAFLDWADQKLLQEKWSPDVVVHQAKEVFEPGQIPSTSTLYHWIDRELMRTRNGDFLE

SEQ ID NO: 5951 - DNA, 516 bp, Alloiococcus otitidis; identical to SEQ ID NO: 5949
  CDS (13)..(513)

SEQ ID NO: 5952 - protein, 167 aa, Alloiococcus otitidis
MNIRRIHMTQAHDSTLSPKGTHLTPAEMHKIEAYKAEGYSNRQIAKLLGRCPQTIHNAIKTGSVPQKRQQKHYGKTYTYYDTIYFADVHAKAYQDHRRHCGRRPKWVDNSAFLDWADQKLLQEKWSPDVVVHQAKEVFEPGQIPSTSTLYHWIDRELMRTRNGDFLE

SEQ ID NO: 5953 - DNA, 408 bp, Alloiococcus otitidis
  CDS (25)..(405)
ctctggtggagcgcaaaactcggtttgagaagctctttaaaatcccctgtcaaagtgccagagcggtccatcaaaccttacaagctttttgaaggggctggaagacaagccagtcaagtcttccagtcgatcacagctgataatggcagtgaatttgctagcttaggccaagtctccaaagtcatcccctctttcttctgccatccctatgcttcttacgaacgaggcagcagtgagaaccaacataaattgattcggcgcttcttacccaaataccagtctttccaagacttaaccgacagtcaggtcagccgaatccaacaatggatgaatgggtatccccgaaaaatcttaggctatcggtcgccctaccaagcctttgtccgtgagttgaggcaattaggctaa

SEQ ID NO: 5954 - protein, 127 aa, Alloiococcus otitidis
MRSSLKSPVKVPERSIKPYKLFEGAGRQASQVFQSITADNGSEFASLGQVSKVIPSFFCHPYASYERGSSENQHKLIRRFLPKYQSFQDLTDSQVSRIQQWMNGYPRKILGYRSPYQAFVRELRQLG

SEQ ID NO: 5955 - DNA, 408 bp, Alloiococcus otitidis
  CDS (40)..(405)
aataagaacgtacgttcgttttttggaggtggttttcatttggcttcacttaaaaaattaattgaggcagagtataaagaagttctgtaccaagacttgaaagatttggttgatgaaaattctgaatcactgattaaagcccattatccatatcgcaactatgatcaaattgaatttgagggacatgacattattagaattggtgtagacgattcgccagcgatcgaagaggttttggttgatattcaaattaagatgtgttggaatgctttcaaaagtgaaagctcaacgccaattagagtgactccatgggcaaatttacaaggagtattctatattaccgaggataattattattttgtagatttcaagtttaagttagccaccctgcgattaaaaattttctga

SEQ ID NO: 5956 - protein, 122 aa, Alloiococcus otitidis
MASLKKLIEAEYKEVLYQDLKDLVDENSESLIKAHYPYRNYDQIEFEGHDIIRIGVDDSPAIEEVLVDIQIKMCWNAFKSESSTPIRVTPWANLQGVFYITEDNYYFVDFKFKLATLRLKIF

SEQ ID NO: 5957 - DNA, 456 bp, Alloiococcus otitidis
  CDS (25)..(453)
aaatgcttatcaaggagaaacaatatgaataaaatatatattagtcaagcactgcctagtaaggaatatcttgaattattaggaacagctctttgtgtgttcaatgcaaataatgcctttattattgaaaatatcctccatgtatcagatcaagatgactggtatatcttgatggattcaaattatcaaaaactcaagaaaaaggttagacaaattattgctaatcaatttggattcgatgagatagcgaatctgtacgatgatttggtacaaagaagaggacgaattgttcatagttttcagattactgattgcaagggtgatcaaattttagcaacaaagactcctaaaaaagaagggcaccagcaattcattattgatgagtcatacttaatggattttattaaaagtaatgatgacctgtctaagttattgcatagttttagaggatattag

SEQ ID NO: 5958 - protein, 143 aa, Alloiococcus otitidis
MNKIYISQALPSKEYLELLGTALCVFNANNAFIIENILHVSDQDDWYILMDSNYQKLKKKVRQIIANQFGFDEIANLYDDLVQRRGRIVHSFQITDCKGDQILATKTPKKEGHQQFIIDESYLMDFIKSNDDLSKLLHSFRGY

SEQ ID NO: 5959 - DNA, 4305 bp, Alloiococcus otitidis
  CDS (34)..(4302)
gtgaatcgcgttcaaattaagccattcgaaacgatggatttaaaggtatatggttatacactgcctcaagtgcctgaccatgatggatatattaagattggggaaacttctagaaaagtggaagatcgaattcgtgaacagttagggacagctggcttaacgccaaatattaaatttcgtcgcactgcccaaaagcaagacggtcagtggttccatgacagtgaccttcaccgttacttaatctcacgaggaattcgccgtcatcattttggtactagtgctaatgaatggttttactttaatggtcaaattgatcaagcagaagctctaacagatgagttcatacagtccggtatcagcaagcaacaagtagccattgaaccgattgattatgagctccggagcgaacaagcgcaggctgttgaggagactttaacttattgccatcagccagggaatgaacgtgaatttctttggaatgccaagccacgatttggtaagaccttaacgacctatgatttgatgttgcgcatgggagcagtgaatacgctcatcgtgaccaaccgccctgcgattgctaactcttggtatgaagatttccataagtttattagccacaaagaccctaacatgaagttcgtttccgaaacagatgcattgaagggcaagggaatgactcgggatgaatttgttgaatttgcggtctccaaagaggcagatgacgctaaacaagtgacctttatttcactccaggaccttaaaggagctcgctttgcaggtggacctcataaaaaactggattgggttgccgaaattccatgggatcttttggtcattgatgaggctcacgagggagtggatactcggaaaacagaccgtgccttcgacaagattaatcgtgactttaccctgcatttgtcggggaccccctttaaggcaatagctaatgagaaattcacggctggccagatctataactggtcttatctggatgaacaagaagccaaggtcaattgggatccaaagttagatactaatccttatgaaaagttaccaacactcagtctatttacctaccagatgagtggcttagttcaagacaagctccaaagaggagccaacctcgaagaagataacaatgtggattatgcctttgacttgaatgagttcttctcgaccaaggataacggccgcttcgagtatgaagccagcgtggtgaagttcttagataacttgagtcaaggtaaaatgcctttctctcccaccgaataccgtcatcaattagatcataccttctggctcttaccgagagttgcctcagctaaggcactggaagctctatttaagaaacacccagtcttcaaggattatcaagtgattttagccgctggagatggcgaaagcctagtcgatagcgagagtgaactggaacaaagtcaggagactaagaagaatcaaaagtcttatgacaaggtcaaagaagcgattgctaagtatccgaagaccattaccttatccgttggacaacttacgactggggtaactattcccgaatggacggctgtcttaatgctgtcaaatatcaagtcaccagtcctatacttccaagccgccttcagagcacaaaatccttatgaatacgaaaaagagggccaactctatcgtaaagagaacgcctatatctttgactttgcgccggaacgtactttgatgctctttgatgaattcgccaataatttgacacccggtcattctgaaactaccaagcaacgtcatgaccagatcaagaccctattgaacttcttcccggtcattgccgaagatgaccaaggtgagatgaaggaacttaatgccgaagaagtactgaccattccacgccatatcaaggcgcgagaaatcgtccgtcaaggctttatgtccaatctgctctttaataatattgtgggaatctttggagctcccaaggaattggtcggtattctggagaagatcccggccgaagagaacaagaagcatgtcaaagacaagcgtccaatcgatctaggagatccgatgttgaatgaacgcggcgaagttgaaatccctgatgaaatcgtgatcaatcggactaagcatgtctttggtgacaaaatattccaggttgatgataagcctgaatccgtgaccgtgaccgttttaaccaatcgctttatgaatggtattgaggatgattttgaccaactacaggatctattcgaactgaacaaagcacagaccaaccgtgttcagaccaatgtgcgtcagaatattaaagatgtggttgaagaagaaatggagcatttcacaactcaatcttcttacatccaaaaagattacaatgaagcactcaaggatcctaaaaacaccaagaccatggtggaattggatgaagagcggcggactaaagaacaagaacttcgtcaagaattccaaaagaatatccaagagcgcacccaaaaaacattggagaagacgattaagaatgagtctaagaaggttgaagagcgcaagaaaaacaagacagaacaagatacccgtgatcacctacgcggctttacacgaaccattcctgctttattaatggcttatggagatcgtgaaacaaggcttgataactttgaagtgaacatcgatccagagactttcttggagattacttccatcactatcgaggaattcaagaagttgcgcgatggcttcaagtataccgatgatgaagggcaagagcgcgaattcaagggcttctttgacgagacagtcttcaatgcgagtgtgcaggaattctatgataaaaaggaagagcttgctaactactttgatgagagtctaactgaagatatctttgactatattcctaatcaacaaaccaatcagatctacaccccgagaggtgtcgttaagatgatggtggataagttagaagaagaaaaccctgacatatttcaaaataagaatttgaagtttgtggatctctatactaaaagtgggctctatttgactgaacttgtcaaacgtttgaatgaaggcttaaaagaccagattgctgatcaggaagagagaattaaatggattttggagaatcaagtctttggagtagcgccaagtaatatcatttataacattgccaagaactatgtttatgggattcatggtaatatcgatactagcaatttagttcaatgggatatggccaagtcagcacaagaaagcactatgcaggaagatttagtgaaggcttatggaggtgagcaaatgaagtttgatgttgtgattgggaatccgccgtatcaagaagatactgtaggaaacaatagagcgacacctatatataatctattcatggaagagagttatcaattatcttcaaaagtagagttgattacaccagccagatttttatttaattctgggcaaacgccaaaaagttggaataaaaaaatgctatccgaccctcatctaaaggtagtttactacgaaaaaaacgctatgaagatattccctacaactgatattaagggtggagtagttgtaacctatcgtgacgaagatattgagtttggagcaatagagttgtttatagaaagttctgagttattatcaattataaataaagtgaagaaaatatccgatttaaacctctctgacatacatcataatagaagtagttataggatgactaatcaagtttatgaggataataaagatttgaaatctaaagttaaaaaatctgagagattatcgattggatcgaatatatttgaaaagttacctgaaatttttttagaaaaaactcctgaaggagtactaagtacagaatataagcgcatatttgggttagctaataagaagagagtttatagatatattcataagtcttatttacaagatcacgttaatttagatagatataaggtttttgtagctaaaagtaatggtagtggaatttttggagaacctttaagtcaattagaaattgggacaccaggaacaggtcatacccaatcttttataagttttggagagtttaattctgaatccgaagcgaataatctttcaacgtatgtacgaactaagtttcttagagccctgctaggagttgagcgagccactcatgataatgcaactaaagacatttggaaatatatccctcttcaagactttactgaaaactccgacatcgactggtccaagtccatccccgaaatcgaccagcaactttatgctaagtatggtctgagtgaggatgagattcaattcattgaagagaaagtacaaccgatggaataa

SEQ ID NO: 5960 - protein, 1423 aa, Alloiococcus otitidis
MDLKVYGYTLPQVPDHDGYIKIGETSRKVEDRIREQLGTAGLTPNIKFRRTAQKQDGQWFHDSDLHRYLISRGIRRHHFGTSANEWFYFNGQIDQAEALTDEFIQSGISKQQVAIEPIDYELRSEQAQAVEETLTYCHQPGNEREFLWNAKPRFGKTLTTYDLMLRMGAVNTLIVTNRPAIANSWYEDFHKFISHKDPNMKFVSETDALKGKGMTRDEFVEFAVSKEADDAKQVTFISLQDLKGARFAGGPHKKLDWVAEIPWDLLVIDEAHEGVDTRKTDRAFDKINRDFTLHLSGTPFKAIANEKFTAGQIYNWSYLDEQEAKVNWDPKLDTNPYEKLPTLSLFTYQMSGLVQDKLQRGANLEEDNNVDYAFDLNEFFSTKDNGRFEYEASVVKFLDNLSQGKMPFSPTEYRHQLDHTFWLLPRVASAKALEALFKKHPVFKDYQVILAAGDGESLVDSESELEQSQETKKNQKSYDKVKEAIAKYPKTITLSVGQLTTGVTIPEWTAVLMLSNIKSPVLYFQAAFRAQNPYEYEKEGQLYRKENAYIFDFAPERTLMLFDEFANNLTPGHSETTKQRHDQIKTLLNFFPVIAEDDQGEMKELNAEEVLTIPRHIKAREIVRQGFMSNLLFNNIVGIFGAPKELVGILEKIPAEENKKHVKDKRPIDLGDPMLNERGEVEIPDEIVINRTKHVFGDKIFQVDDKPESVTVTVLTNRFMNGIEDDFDQLQDLFELNKAQTNRVQTNVRQNIKDVVEEEMEHFTTQSSYIQKDYNEALKDPKNTKTMVELDEERRTKEQELRQEFQKNIQERTQKTLEKTIKNESKKVEERKKNKTEQDTRDHLRGFTRTIPALLMAYGDRETRLDNFEVNIDPETFLEITSITIEEFKKLRDGFKYTDDEGQEREFKGFFDETVFNASVQEFYDKKEELANYFDESLTEDIFDYIPNQQTNQIYTPRGVVKMMVDKLEEENPDIFQNKNLKFVDLYTKSGLYLTELVKRLNEGLKDQIADQEERIKWILENQVFGVAPSNIIYNIAKNYVYGIHGNIDTSNLVQWDMAKSAQESTMQEDLVKAYGGEQMKFDVVIGNPPYQEDTVGNNRATPIYNLFMEESYQLSSKVELITPARFLFNSGQTPKSWNKKMLSDPHLKVVYYEKNAMKIFPTTDIKGGVVVTYRDEDIEFGAIELFIESSELLSIINKVKKISDLNLSDIHHNRSSYRMTNQVYEDNKDLKSKVKKSERLSIGSNIFEKLPEIFLEKTPEGVLSTEYKRIFGLANKKRVYRYIHKSYLQDHVNLDRYKVFVAKSNGSGIFGEPLSQLEIGTPGTGHTQSFISFGEFNSESEANNLSTYVRTKFLRALLGVERATHDNATKDIWKYIPLQDFTENSDIDWSKSIPEIDQQLYAKYGLSEDEIQFIEEKVQPME

SEQ ID NO: 5961 - DNA, 4305 bp, Alloiococcus otitidis; identical to SEQ ID NO: 5959
  CDS (1)..(4302)

SEQ ID NO: 5962 - protein, 1434 aa, Alloiococcus otitidis
MNRVQIKPFETMDLKVYGYTLPQVPDHDGYIKIGETSRKVEDRIREQLGTAGLTPNIKFRRTAQKQDGQWFHDSDLHRYLISRGIRRHHFGTSANEWFYFNGQIDQAEALTDEFIQSGISKQQVAIEPIDYELRSEQAQAVEETLTYCHQPGNEREFLWNAKPRFGKTLTTYDLMLRMGAVNTLIVTNRPAIANSWYEDFHKFISHKDPNMKFVSETDALKGKGMTRDEFVEFAVSKEADDAKQVTFISLQDLKGARFAGGPHKKLDWVAEIPWDLLVIDEAHEGVDTRKTDRAFDKINRDFTLHLSGTPFKAIANEKFTAGQIYNWSYLDEQEAKVNWDPKLDTNPYEKLPTLSLFTYQMSGLVQDKLQRGANLEEDNNVDYAFDLNEFFSTKDNGRFEYEASVVKFLDNLSQGKMPFSPTEYRHQLDHTFWLLPRVASAKALEALFKKHPVFKDYQVILAAGDGESLVDSESELEQSQETKKNQKSYDKVKEAIAKYPKTITLSVGQLTTGVTIPEWTAVLMLSNIKSPVLYFQAAFRAQNPYEYEKEGQLYRKENAYIFDFAPERTLMLFDEFANNLTPGHSETTKQRHDQIKTLLNFFPVIAEDDQGEMKELNAEEVLTIPRHIKAREIVRQGFMSNLLFNNIVGIFGAPKELVGILEKIPAEENKKHVKDKRPIDLGDPMLNERGEVEIPDEIVINRTKHVFGDKIFQVDDKPESVTVTVLTNRFMNGIEDDFDQLQDLFELNKAQTNRVQTNVRQNIKDVVEEEMEHFTTQSSYIQKDYNEALKDPKNTKTMVELDEERRTKEQELRQEFQKNIQERTQKTLEKTIKNESKKVEERKKNKTEQDTRDHLRGFTRTIPALLMAYGDRETRLDNFEVNIDPETFLEITSITIEEFKKLRDGFKYTDDEGQEREFKGFFDETVFNASVQEFYDKKEELANYFDESLTEDIFDYIPNQQTNQIYTPRGVVKMMVDKLEEENPDIFQNKNLKFVDLYTKSGLYLTELVKRLNEGLKDQIADQEERIKWILENQVFGVAPSNIIYNIAKNYVYGIHGNIDTSNLVQWDMAKSAQESTMQEDLVKAYGGEQMKFDVVIGNPPYQEDTVGNNRATPIYNLFMEESYQLSSKVELITPARFLFNSGQTPKSWNKKMLSDPHLKVVYYEKNAMKIFPTTDIKGGVVVTYRDEDIEFGAIELFIESSELLSIINKVKKISDLNLSDIHHNRSSYRMTNQVYEDNKDLKSKVKKSERLSIGSNIFEKLPEIFLEKTPEGVLSTEYKRIFGLANKKRVYRYIHKSYLQDHVNLDRYKVFVAKSNGSGIFGEPLSQLEIGTPGTGHTQSFISFGEFNSESEANNLSTYVRTKFLRALLGVERATHDNATKDIWKYIPLQDFTENSDIDWSKSIPEIDQQLYAKYGLSEDEIQFIEEKVQPME

SEQ ID NO: 5963 - DNA, 333 bp, Alloiococcus otitidis
  CDS (16)..(330)
gtgatcacgggtatcttgttctgtcttgtttttcttgcgctcttcaaccttcttagactcattcttaatcgtcttctccaatgttttttgggtgcgctcttggatattcttttggaattcttgacgaagttcttgttctttagtccgccgctcttcatccaattccaccatggtcttggtgtttttaggatccttgagtgcttcattgtaatctttttggatgtaagaagattgagttgtgaaatgctccatttcttcttcaaccacatctttaatattctgacgcacattggtctgaacacggttggtctgtgctttgttcagttcgaatag

SEQ ID NO: 5964 - protein, 105 aa, Alloiococcus otitidis
MFCLVFLALFNLLRLILNRLLQCFLGALLDILLEFLTKFLFFSPPLFIQFHHGLGVFRILECFIVIFLDVRRLSCEMLHFFFNHIFNILTHIGLNTVGLCFVQFE

SEQ ID NO: 5965 - DNA, 333 bp, Alloiococcus otitidis; identical to SEQ ID NO: 5963
  CDS (1)..(330)

SEQ ID NO: 5966 - protein, 110 aa, Alloiococcus otitidis
MITGILFCLVFLALFNLLRLILNRLLQCFLGALLDILLEFLTKFLFFSPPLFIQFHHGLGVFRILECFIVIFLDVRRLSCEMLHFFFNHIFNILTHIGLNTVGLCFVQFE

SEQ ID NO: 5967 - DNA, 816 bp, Alloiococcus otitidis
  CDS (136)..(813)
ataaatacggttagatcaccaaagaaaaaatataggaggggagtattattgacggaagagcaaaaaatatatacaaaaagtaaacaacgtgttcaaaagcatggtgaagtatttactccaagaagaattgtaaacatgatgctagaccaacccggagtcaaagaagcttgtaattctttagaagccactttcttggagccttcagctggtgaaggggcatttttaatagaaatattggagcgaaaacttgatatggtaaaaaagaactataattctagtttaactcaatatgaaaattattcactctttgctttagctactctttatggcatagagttgctagaggataatgctcaacgatgcgtcatgaatatgtataagatttacaatgatcactaccggacagtagctgaagactataataaatctcctcgtgataaaatatataaagcggcacaatatattatttcaaagaatattgtacaggggaattttttaacgaaggaattggaaaacggtgaacccattatttttagtgaatggaagcttaagataagaagagccaaccaaaaaactttgaaagtaatccgaactgagtacagtttggcagagatatcggaagatattcatcatgatcctggttttatctatactgatcaagagaaagaagactttattcaattaaacttatttgaagagacggatgttagcactgaagaataccagagagataaaatttaccgttatgcaccctgtaaggtagaggatgtgtataaagaagaaatggaggagttaggtgaatcgcgttcaaattaa

SEQ ID NO: 5968 - protein, 226 aa, Alloiococcus otitidis
MMLDQPGVKEACNSLEATFLEPSAGEGAFLIEILERKLDMVKKNYNSSLTQYENYSLFALATLYGIELLEDNAQRCVMNMYKIYNDHYRTVAEDYNKSPRDKIYKAAQYIISKNIVQGNFLTKELENGEPIIFSEWKLKIRRANQKTLKVIRTEYSLAEISEDIHHDPGFIYTDQEKEDFIQLNLFEETDVSTEEYQRDKIYRYAPCKVEDVYKEEMEELGESRSN

SEQ ID NO: 5969 - DNA, 816 bp, Alloiococcus otitidis; identical to SEQ ID NO: 5967
  CDS (49)..(813)

SEQ ID NO: 5970 - protein, 255 aa, Alloiococcus otitidis
MTEEQKIYTKSKQRVQKHGEVFTPRRIVNMMLDQPGVKEACNSLEATFLEPSAGEGAFLIEILERKLDMVKKNYNSSLTQYENYSLFALATLYGIELLEDNAQRCVMNMYKIYNDHYRTVAEDYNKSPRDKIYKAAQYIISKNIVQGNFLTKELENGEPIIFSEWKLKIRRANQKTLKVIRTEYSLAEISEDIHHDPGFIYTDQEKEDFIQLNLFEETDVSTEEYQRDKIYRYAPCKVEDVYKEEMEELGESRSN

SEQ ID NO: 5971 - DNA, 1260 bp, Alloiococcus otitidis
  CDS (16)..(1257)
atcttggaaatagagatgttatttttagcaaaaaaagataaagataatgttgaagttcaaaagattagggatacattgcataatataaaaggtatattttttactaaagatgtaatatgctataagcaaaacgaagtatactttaaagtaaaattgtcccctaataaaaaatatgctaacttatctttaaatatagatggagaaaatagcgttaatgctcagattttaagtcaattaaataagataatagtagaaggtaaaaatagagaaaaatttaacattattactgccaatgacgaagcctcaaaatacatgaatgggaagctttataatttgatatctgacaacgagcaaaaaataagacaattaatctatcttatactaacagatgtttttggtatgtattgggctgaagaaacgttagatagtggtcaatataaagaaattaaaaggcgatcacatggggatagtcaacacgtaattgaaaagggtttagaagaatttacttatcaggaatacattacttttctctttgataaaagaccgaataaattttcagatgaaaaatttttaaataaaacaatcgataatatttcgagctaccctgaagaaataaagaaagagaccataatgtcccttttagttgaaagtaaaggaaaatctttatgggaaaattatttctcagatgttaattatgaagatgctgaaaatgatatcgagtcaatacgaaaaattagaaacaaagtcatgcataataaacagatttcattcgaaggattcactaactataaaaagctgttaagtaaatctaataggggtttagaagaagcgatagaatatgttaagaaatcacaaaagggaacatttatttacgaagatgtattttattcattgatgaaatctgttgttgaaataaagggtgtatcttcccagttgcctaagattgaaacagttgcagagttaatgaacaagactttatctgatatacctatagataggatatctacgactttgagtgatattaataaagcatatgaattttcatatatgaaaaatatacgcaaattcaaagatagcttaactccgctattggataatataaaacatgacaaattttctatgaaagacaacggacttaaaaattttgattttttaaaatcaaataaaccgtccataaataatatgattgatcgttccgtttttaaggatgttgataattccgatgaaggtgacgtcggtggtgatgaaagtaatagttaa

SEQ ID NO: 5972 - protein, 414 aa, Alloiococcus otitidis
MLFLAKKDKDNVEVQKIRDTLHNIKGIFFTKDVICYKQNEVYFKVKLSPNKKYANLSLNIDGENSVNAQILSQLNKIIVEGKNREKFNIITANDEASKYMNGKLYNLISDNEQKIRQLIYLILTDVFGMYWAEETLDSGQYKEIKRRSHGDSQHVIEKGLEEFTYQEYITFLFDKRPNKFSDEKFLNKTIDNISSYPEEIKKETIMSLLVESKGKSLWENYFSDVNYEDAENDIESIRKIRNKVMHNKQISFEGFTNYKKLLSKSNRGLEEAIEYVKKSQKGTFIYEDVFYSLMKSVVEIKGVSSQLPKIETVAELMNKTLSDIPIDRISTTLSDINKAYEFSYMKNIRKFKDSLTPLLDNIKHDKFSMKDNGLKNFDFLKSNKPSINNMIDRSVFKDVDNSDEGDVGGDESNS

SEQ ID NO: 5973 - DNA, 1260 bp, Alloiococcus otitidis; identical to SEQ ID NO: 5971
  CDS (4)..(1257)

SEQ ID NO: 5974 - protein, 418 aa, Alloiococcus otitidis
MEIEMLFLAKKDKDNVEVQKIRDTLHNIKGIFFTKDVICYKQNEVYFKVKLSPNKKYANLSLNIDGENSVNAQILSQLNKIIVEGKNREKFNIITANDEASKYMNGKLYNLISDNEQKIRQLIYLILTDVFGMYWAEETLDSGQYKEIKRRSHGDSQHVIEKGLEEFTYQEYITFLFDKRPNKFSDEKFLNKTIDNISSYPEEIKKETIMSLLVESKGKSLWENYFSDVNYEDAENDIESIRKIRNKVMHNKQISFEGFTNYKKLLSKSNRGLEEAIEYVKKSQKGTFIYEDVFYSLMKSVVEIKGVSSQLPKIETVAELMNKTLSDIPIDRISTTLSDINKAYEFSYMKNIRKFKDSLTPLLDNIKHDKFSMKDNGLKNFDFLKSNKPSINNMIDRSVFKDVDNSDEGDVGGDESNS

SEQ ID NO: 5975 - DNA, 78 bp, Alloiococcus otitidis
  CDS (1)..(75)
atggaattaggcagcataaaagtatttagcaagatcatggggctagaattgattggagattatgaatcttggaaatag

SEQ ID NO: 5976 - protein, 25 aa, Alloiococcus otitidis
MELGSIKVFSKIMGLELIGDYESWK

SEQ ID NO: 5977 - DNA, 1560 bp, Alloiococcus otitidis
  CDS (58)..(1557)
atcgtgcgaaatttattcttcgtatggagcataataatacaagaaactggtgtcaaaatggaaaaagatgacttgcaaaaattaaaagagaataaaaatttagaatataagaaagcaaaaaacacagtaccgaaatctttttgggaaacatattctgcttttgcgaatactaatggaggtactgtaatatttggcttagacgagaaaaccaatcaaatagagggagtaattgatcctaataaaataaaaaatgatttatttaatatgctcaataattctcaaaaagttagtcacaatataataaaggatgagaatgtagatattatatctattaatcatgaaactcaaatagttgtgattgaggtacctgaagcatcatatcatttaaagcctatttatattaacggcaacccaagacaagcttttgagcgatttggtgaaggtgatagacttttaactcaggaaaaatataaggctttaattgtaggatcgcaagaacaaacagataatgaattgttaaaagactatgatttctctgatctatgtgaaaaagatttagaaatatataaagaagaattatacaagcaaactgggaacgaaaagtatttgaaaaacaattacgaatctatgttaatagaaattggagcaatgaggaaagaccggcaaggggatggcaactattatttaaccacaggtggattactttttttcggtaaaacgaactctattacagataggtttcccggttttcaattagactattttgaaaaagattcttctttagcctccgcttggcttgatcgtgtatcaagtggtgatgctacatatccgcaaattaatgtatatagcttttttagaaatgttttggagaaattaaaagtcacaattaaagaagaatttgttattgatagtgatacccaggcaaggctaccttttagaaatgaattattaacgtcaattagagaggcccttgtaaattctttaatgcatgcctattatgattctgaaacccctataaaaataacggcctatccagattattatgagtttgtaaatcctggtaaaatgcgaatcaccgtcaaggagtttatacatggcggagtctctaatattcgaaatcaaactatgtcttcaatattacgacgtatcggaatttcagaaaaagccgggagcggggggccgagaatttttgacattgcttctaaatataaactgaaattacccgagatcatacgagaacaagacaaaactgttgtaagaatttggaaagttgatatagctaaaacatttgagcattaccctgaaaatcagcaaaagctacttttttatcttgttgaaaaccaatttattagtagaagtgaagccaacgaaaagttaaaaatggataattatacttttagaactaacattgatattctactaaagaaaaatcttatagaagttattgggaaaggacgatcaacaaaatacgttttgaaaatgagttcctcagaacattcatacagtataaaacgttatctgagaactatagaagataaaataatacatcgagatatataa

SEQ ID NO: 5978 - protein, 500 aa, Alloiococcus otitidis
MEKDDLQKLKENKNLEYKKAKNTVPKSFWETYSAFANTNGGTVIFGLDEKTNQIEGVIDPNKIKNDLFNMLNNSQKVSHNIIKDENVDIISINHETQIVVIEVPEASYHLKPIYINGNPRQAFERFGEGDRLLTQEKYKALIVGSQEQTDNELLKDYDFSDLCEKDLEIYKEELYKQTGNEKYLKNNYESMLIEIGAMRKDRQGDGNYYLTTGGLLFFGKTNSITDRFPGFQLDYFEKDSSLASAWLDRVSSGDATYPQINVYSFFRNVLEKLKVTIKEEFVIDSDTQARLPFRNELLTSIREALVNSLMHAYYDSETPIKITAYPDYYEFVNPGKMRITVKEFIHGGVSNIRNQTMSSILRRIGISEKAGSGGPRIFDIASKYKLKLPEIIREQDKTVVRIWKVDIAKTFEHYPENQQKLLFYLVENQFISRSEANEKLKMDNYTFRTNIDILLKKNLIEVIGKGRSTKYVLKMSSSEHSYSIKRYLRTIEDKIIHRDI

SEQ ID NO: 5979 - DNA, 1560 bp, Alloiococcus otitidis; identical to SEQ ID NO: 5977
  CDS (4)..(1557)

SEQ ID NO: 5980 - protein, 518 aa, Alloiococcus otitidis
MRNLFFVWSIIIQETGVKMEKDDLQKLKENKNLEYKKAKNTVPKSFWETYSAFANTNGGTVIFGLDEKTNQIEGVIDPNKIKNDLFNMLNNSQKVSHNIIKDENVDIISINHETQIVVIEVPEASYHLKPIYINGNPRQAFERFGEGDRLLTQEKYKALIVGSQEQTDNELLKDYDFSDLCEKDLEIYKEELYKQTGNEKYLKNNYESMLIEIGAMRKDRQGDGNYYLTTGGLLFFGKTNSITDRFPGFQLDYFEKDSSLASAWLDRVSSGDATYPQINVYSFFRNVLEKLKVTIKEEFVIDSDTQARLPFRNELLTSIREALVNSLMHAYYDSETPIKITAYPDYYEFVNPGKMRITVKEFIHGGVSNIRNQTMSSILRRIGISEKAGSGGPRIFDIASKYKLKLPEIIREQDKTVVRIWKVDIAKTFEHYPENQQKLLFYLVENQFISRSEANEKLKMDNYTFRTNIDILLKKNLIEVIGKGRSTKYVLKMSSSEHSYSIKRYLRTIEDKIIHRDI

SEQ ID NO: 5981 - DNA, 750 bp, Alloiococcus otitidis
  CDS (10)..(747)
ggagtaactatggcaaaaaaactgaaagactattatgaccacacttacttagaaaattttgcaaataagctattgtcagtgactagcagttttgacaaagaagaatttttgaaattaacgaaaacaaaaatcctggacttgaagtttagtcaaaggcaggacttggtggcaagggctttatctcagtccattcacttgggctatgaagagacattagaagtttttagccaaatacttggccctgaactcaggggtaatgccggtgcatttacggaaggttggtggctgtggccggtggggaggtttgtagaactttacggaccagactacttccaagccagtattgacttcagcaaggagctgaccaaacgctttacctcggagttttgcatgcgtcccttggtccaaaaatacccagaacaatcattcaccattttaaaggactggagcttggatgaccacgagcgtgtccggcgactgtctagtgaatgcctacgaattcgcctcccttgggctaagaagatgacggtggcccttgattactttaatgattatgtagaaatattatccaacttgaaggatgacaaggacaagtatatccaaaaaagtgtggccaataacctcaacgacctctacaaggaagaccctaagaaattttactccattatccatgactggcaaaagggacagcctagcaaagaatgcctctgggtgatcaagcatgggtccaggaatgtggagggaggttag

SEQ ID NO: 5982 - protein, 246 aa, Alloiococcus otitidis
MAKKLKDYYDHTYLENFANKLLSVTSSFDKEEFLKLTKTKILDLKFSQRQDLVARALSQSIHLGYEETLEVFSQILGPELRGNAGAFTEGWWLWPVGRFVELYGPDYFQASIDFSKELTKRFTSEFCMRPLVQKYPEQSFTILKDWSLDDHERVRRLSSECLRIRLPWAKKMTVALDYFNDYVEILSNLKDDKDKYIQKSVANNLNDLYKEDPKKFYSIIHDWQKGQPSKECLWVIKHGSRNVEGG

SEQ ID NO: 5983 - DNA, 231 bp, Alloiococcus otitidis
  CDS (19)..(228)
cgggaagggtttaggcaagtgattgaaaaagaaaatttagaaaaaatagaaagactatttaacttagattcttggtatattatcagtccatttttaaatatctacccttatgaaagtgattttgatcatttacaagagtattttgaaagggaatatttacatgagtattgtgacagtataaaaaaatattatttaggattatttgttactatgattcaattgtatatctaa

SEQ ID NO: 5984 - protein, 70 aa, Alloiococcus otitidis
MIEKENLEKIERLFNLDSWYIISPFLNIYPYESDFDHLQEYFEREYLHEYCDSIKKYYLGLFVTMIQLYI

SEQ ID NO: 5985 - DNA, 1875 bp, Alloiococcus otitidis
  CDS (31)..(1872)
tcctcttacgaaaaggaatgggagattgctatggataatttggtttatagtttgaggtcttttcaagcagaaaataaagcggactttcgcaagaagatcaaaactttgatgactaacaaaggttatgataataaagaatcacagatcatttcctggaatgactgctttgattttttaaagcggcacctgcctttcagtcagcttgctccagaactatctattatttttgaatacatgttgccccttgaaggaggtagaagaccggatgtcattttactaagtcgcaataaggtcttaattctagaatttaaacgaaaaaatgatgtcactccgaaagatctggagcaagctattaactaccggaaaaacatagaaaattaccactatgaaaccgcagaccatcaattgatcgttcattcgtatgtggtatatacactggacgatgtaaggccctacaaggaccgtagtattgccatcctaacagcggaaaatttttctagagaaatgactaaagaattgctcggacaaagtgcatatactgatgttgagaaatggctaggatcaaaataccagcctttagaaagtctagttaaagcgacaaaagatttatttgattctggaagattgccacagattaagcgcattgaagaaagtgatattagtgaggctctggaggctattaggaatatcgttaataggggtcaaggccagaagaatctcatttttattagtggtgtcccgggttctggcaaaacgttagtaggcttgaaatcggtgtatgactatcttgaaagtagtttaaaccccatttttctttcaggaaacgggccacttgtagacgtcttgcaaaaattgttatcgacctctggattaaatgagggtagcagtgcaataaggaaaatgcaccaatttataagtgagtatcatgcaaataattctggacttgagtataccaagcagtcggataaccagttgattgtctttgatgaagcccaacgtgcctgggatgataaacgaaataaggagtatgggaaaagcgaacctaaagttttgcttgatattgcagacagaatatttaaccaacaccagcaagttagcttgatttgccttatcggagacggtcaagcaatttatactggtgaagaaaaggggatggctctatggcatgaggtggtaaaagataggcaagactggaatgtctttatacccaagagctatgagtcagaattccaaagggcaaattatcaaattaatgatgacttatttttagacgtatccatccgcaatgattttattaatattgtgccctggattgataatatactaacggccgatcttgaaggagcacaaaaagcatttattgaaatcttcaaagcggggttcaaggctcgtttgatccgcaatccccagatcttaccaagaattgcgcagaagacgaaagatgcattccccaatgaccatgtgggactctatatttcctcaaaggtacctaaatggaattttaaaaacattttccctggacaggatgttgaccaattatataataagcaatcagttaattggtatttgaagacggctcacaaactcaagcgtgcagcaactgagtttcaaagccaaggcttagaatctgagtggccaatcgtaacttttggcggagattattacttgaaaaataatcaatgggttattgcagattcagttaaaaatgataagagaaatcaacaatttgagaatttccctacaattgttgaaaatatttaccgggtactcttgtccagaagtcgaaagggtatctatatttatattcctgaatttgattacttagatgaactttatgacttctttaaacagatgggaatccaagaaataaaatga

SEQ ID NO: 5986 - protein, 614 aa, Alloiococcus otitidis
MDNLVYSLRSFQAENKADFRKKIKTLMTNKGYDNKESQIISWNDCFDFLKRHLPFSQLAPELSIIFEYMLPLEGGRRPDVILLSRNKVLILEFKRKNDVTPKDLEQAINYRKNIENYHYETADHQLIVHSYVVYTLDDVRPYKDRSIAILTAENFSREMTKELLGQSAYTDVEKWLGSKYQPLESLVKATKDLFDSGRLPQIKRIEESDISEALEAIRNIVNRGQGQKNLIFISGVPGSGKTLVGLKSVYDYLESSLNPIFLSGNGPLVDVLQKLLSTSGLNEGSSAIRKMHQFISEYHANNSGLEYTKQSDNQLIVFDEAQRAWDDKRNKEYGKSEPKVLLDIADRIFNQHQQVSLICLIGDGQAIYTGEEKGMALWHEVVKDRQDWNVFIPKSYESEFQRANYQINDDLFLDVSIRNDFINIVPWIDNILTADLEGAQKAFIEIFKAGFKARLIRNPQILPRIAQKTKDAFPNDHVGLYISSKVPKWNFKNIFPGQDVDQLYNKQSVNWYLKTAHKLKRAATEFQSQGLESEWPIVTFGGDYYLKNNQWVIADSVKNDKRNQQFENFPTIVENIYRVLLSRSRKGIYIYIPEFDYLDELYDFFKQMGIQEIK

SEQ ID NO: 5987 - DNA, 288 bp, Alloiococcus otitidis
  CDS (34)..(285)
agccatccccttttcttcaccagtataaattgcttgaccgtctccgataaggcaaatcaagctaacttgctggtgttggttaaatattctgtctgcaatatcaagcaaaactttaggttcgcttttcccatactccttatttcgtttatcatcccaggcacgttgggcttcatcaaagacaatcaactggttatccgactgcttggtatactcaagtccagaattatttgcatgatactcacttataaattggtgcattttccttattgcactgctaccctcatttaa

SEQ ID NO: 5988 - protein, 84 aa, Alloiococcus otitidis
MTVSDKANQANLLVLVKYSVCNIKQNFRFAFPILLISFIIPGTLGFIKDNQLVIRLLGILKSRIICMILTYKLVHFPYCTATLI

SEQ ID NO: 5989 - DNA, 990 bp, Alloiococcus otitidis
  CDS (1)..(987)
atgtcagtgttttttgtattccagggtacaacctatgatgatgaacgtaagggtggattcgtttggtctccacagttgaacaagcgtggaggtaaaaatagaggttttaccaatatgacttatataaaaaaagaagattttatagtccactcagctaatcaaatgattaagtcaatcagtatagctcaaacggattgttatgaagctgatagacctgactatacgacagccgaagaaaatctgtgggacaagcaaggctatatggtgaacaccttgtataaagacttagatcagcctctgaaactcagtaaccatagagagtggctaattgaaaattatagaccaaatagtgcttttctgaaagatggaagaggcaaacagcaatatatgtgcttactggatgaagaccatgctatttattttttagaagaagcgataaaaatacaaaactctgaagaagctgtcagggtgttaaaaagggctctgcaagatataattggagaaaaagaatcagagtatgacgtggttgaaaagcaggtaatagataatttagtagacaatgaagctgatgtagtaccagagtggacgggagagcaaagagctcaagaaatgacaactgcttcttttgaagaaagacaaaagccaaagcgtaatcctaaagttgcagcagctgccttgcaaagagcaggctatcagtgcgaatttaatccgaatgacaggatttttttaagaaaaaataataaggggtatactgaacctcaccatcttattcctatcagtcaatatcgtgattttgattataccaagtacagtcttgatgtgatggaaaacattgtctctttatgtagtcattgccataatttgcttcattatggaaaaatggaagataaaattccccttttgaaaaaattgtatgaagacagacaagctgccttggcccaagttggactagaaatatcatttgaggaattaaaagcatactatgaatag

SEQ ID NO: 5990 - protein, 329 aa, Alloiococcus otitidis
MSVFFVFQGTTYDDERKGGFVWSPQLNKRGGKNRGFTNMTYIKKEDFIVHSANQMIKSISIAQTDCYEADRPDYTTAEENLWDKQGYMVNTLYKDLDQPLKLSNHREWLIENYRPNSAFLKDGRGKQQYMCLLDEDHAIYFLEEAIKIQNSEEAVRVLKRALQDIIGEKESEYDVVEKQVIDNLVDNEADVVPEWTGEQRAQEMTTASFEERQKPKRNPKVAAAALQRAGYQCEFNPNDRIFLRKNNKGYTEPHHLIPISQYRDFDYTKYSLDVMENIVSLCSHCHNLLHYGKMEDKIPLLKKLYEDRQAALAQVGLEISFEELKAYYE

SEQ ID NO: 5991 - DNA, 588 bp, Alloiococcus otitidis
  CDS (79)..(585)
gaaaaggtgatagaatcaagtttagttgataagataaaagtgaatagagggctttgtcttaaatttacatccccatcaatgacaggaataccagataggataatacttctgccaaaagcaaagattgaatttattgaaacaaaaagacctggaagagaaccaagaccaattcaaaaaaaggataagccatttaaaaaattaaattttaaggtttatgttcttgattttaaagaaaatattgatgaaataataaagagaatcgaagatgacaacttggaatacactctacgtaaatatcaaaactatcctactgaatttataaaagaaaatagaaaatcgtcacttttactagatatgggtttagataagacggttataggcctaatggctataaaagatttattttttgatgcttttgcaatttctaaagttttaatcatagtaccattaagagttgctagatatacttggaaagaagagatagaagggtggtcccaccctgatatcttaaaatattcagtattaataggtagtgaagaagaaagaataaaaggagtagatatattcccaagaacgaggctttcctaa

SEQ ID NO: 5992 - protein, 169 aa, Alloiococcus otitidis
MTGIPDRIILLPKAKIEFIETKRPGREPRPIQKKDKPFKKLNFKVYVLDFKENIDEIIKRIEDDNLEYTLRKYQNYPTEFIKENRKSSLLLDMGLDKTVIGLMAIKDLFFDAFAISKVLIIVPLRVARYTWKEEIEGWSHPDILKYSVLIGSEEERIKGVDIFPRTRLS

SEQ ID NO: 5993 - DNA, 588 bp, Alloiococcus otitidis; identical to SEQ ID NO: 5991
  CDS (7)..(585)

SEQ ID NO: 5994 - protein, 193 aa, Alloiococcus otitidis
MIESSLVDKIKVNRGLCLKFTSPSMTGIPDRIILLPKAKIEFIETKRPGREPRPIQKKDKPFKKLNFKVYVLDFKENIDEIIKRIEDDNLEYTLRKYQNYPTEFIKENRKSSLLLDMGLDKTVIGLMAIKDLFFDAFAISKVLIIVPLRVARYTWKEEIEGWSHPDILKYSVLIGSEEERIKGVDIFPRTRLS

SEQ ID NO: 5995 - DNA, 522 bp, Alloiococcus otitidis
  CDS (67)..(519)
gtttacaaaagtaaacttatcttaagtactaagtctacaattgtaaacaataaggagggaaatacaatgggtgtaatagtatataatactcatatcacagatgctgaatgggaggtcatgcgtgtagtttggtcaaatgatcgagtaactagtaaaaaagtcatctccatattgcaagaaaaaatggactggacgcaatccactatcaaaacgatcttaggtcgattagttggaaaaggcgtactaaatacagagcgagaaggtagaaagtttatttacactgccaatattgaagagaaagaagccgtaagggattatgcagaagatatttttaaccgtatttgcaaaaagaaagtcggaaatgtaataggaagcatcattgaagatcatgtcttaagcttcgatgatatagatcgactagaaaaaatattagagatgaaaaaatctttcgcagtagaagaagtggattgcaattgtccagaaggacaatgtgaatgcaatttacatcataagggagaataa

SEQ ID NO: 5996 - protein, 151 aa, Alloiococcus otitidis
MGVIVYNTHITDAEWEVMRVVWSNDRVTSKKVISILQEKMDWTQSTIKTILGRLVGKGVLNTEREGRKFIYTANIEEKEAVRDYAEDIFNRICKKKVGNVIGSIIEDHVLSFDDIDRLEKILEMKKSFAVEEVDCNCPEGQCECNLHHKGE

SEQ ID NO: 5997 - DNA, 2181 bp, Alloiococcus otitidis
  CDS (130)..(2178)
aagaagtggattgcaattgtccagaaggacaatgtgaatgcaatttacatcataagggagaataaggaggaattaaaaatgaagaataacaataaacactcatcccacagtcaccataatcatggcgacatgaatcactcaaaacatgagcatgtaagcacggaagaacatagagaccataataaggatcaacatcacgaccatcatgctggccatgaccacggtgggcacagtgggcatgagcatcatcatggaaactttaaggaacttttcttaaagtcattgccactaggaatcattattatgctcttatcccctatggctgggtttgacctaccattccagtttacttttccatattctgatattgtagtagctattttatctactatattaattatttatggtggacgtccattctatcaaggggcagttgacgaatttaaacaaaaagaacctggaatgatggctctcgtttctttaggtttaagtgtttcatatttatatagtatttatactgtaatagcaagctacgtaacaggtgaacaaattatggattttttctttgaatttgcttcattactattaatcatgctattaggtcactggattgagatgaaagctattggagaagcaggagatgcacaagaagaactggctaagctagtaccaaaagatgctcacgttgtgttagaagatgattcaattgaaacacgaccagttgctgacttaaaggtaggtgatttaattcgagttcaagctggagaaaatgtgccagcagatggaactatcgagcgtggagaatcacgtctaaatgaagctcttttgactggggaatctaaatcaattaaaaaaggtcctggcgatgaagtgattgggggctcaacaaatggggaaggggttctttatattaaagtacttgagacaggtgataagtcctttatatctcaagtacagaatctaattagccaagctcaaagtcagccttctagagcagaaaatattgctcaaaaggttgcagggtggctgttctatattgcggtaactgtcgcactaatagcttttgtagtatggacgcttatagcggacatcccaacgtcagtaaaatttgctatcacaacattagttatagcttgtcctcacgccttgggtctagcaattccattggtcaccgctcgtagcacaagcttaggggcaagtcgtggcttactagtaaaagaccgagaatccttagaaatagctcaaggtgcagatgtgatgattttagataagacaggtactttaacaacaggtgagtttaaagtattagatgttgaactttttaatgaaaaatatacaaaagaagaaatcattgccttactggcaggtattgaaggaggatctagccaccctattgctcaatcaattataagcttcgctgaccaagaaggtgtaagtccagtatcctttgatttcattgatgtaatttccggtgctggcgtagaaggtaaagccaatgggcaccgataccaattagtcagtcaaaaagcatatggacgtaatctagatatggatattccaaaaggagcaaccctcagtgtcttagtagaaaatgatgaagctattggtgctgtagccttaggagacaaattaaaagcaacaagtaaagatttaattgaagctcttaaaaataacaatatagagccgattatggcaacaggtgataatgaaaaagcagctcaaggcgcggcagaagatttagggattgaatatagatcaaatcaatctccacaagacaaatatgaattagttaaaacacttaaagatgaaggaaagaaagttatcatggtaggtgacggtgtcaatgatgccccttctcttgccttggcagacgttggtatagctgttggtgctgggactcaagttgcattggattcagctgatgtcatcttgactcaatctgatccaggagatattgaatcatttattgaattagcacacaaaacaactcgtaaaatgaaacaaaatctcttttggggagctggttataactttatagctatccctctagctgcaggaattttggctcctattggtatcacattaagccctgcattaggagcaattctaatgtctgtgtcaacagtcatcgtcgccattaatgctattttattaagtttagatccaaaaaataacggttaa

SEQ ID NO: 5998 - protein, 683 aa, Alloiococcus otitidis
MNHSKHEHVSTEEHRDHNKDQHHDHHAGHDHGGHSGHEHHHGNFKELFLKSLPLGIIIMLLSPMAGFDLPFQFTFPYSDIVVAILSTILIIYGGRPFYQGAVDEFKQKEPGMMALVSLGLSVSYLYSIYTVIASYVTGEQIMDFFFEFASLLLIMLLGHWIEMKAIGEAGDAQEELAKLVPKDAHVVLEDDSIETRPVADLKVGDLIRVQAGENVPADGTIERGESRLNEALLTGESKSIKKGPGDEVIGGSTNGEGVLYIKVLETGDKSFISQVQNLISQAQSQPSRAENIAQKVAGWLFYIAVTVALIAFVVWTLIADIPTSVKFAITTLVIACPHALGLAIPLVTARSTSLGASRGLLVKDRESLEIAQGADVMILDKTGTLTTGEFKVLDVELFNEKYTKEEIIALLAGIEGGSSHPIAQSIISFADQEGVSPVSFDFIDVISGAGVEGKANGHRYQLVSQKAYGRNLDMDIPKGATLSVLVENDEAIGAVALGDKLKATSKDLIEALKNNNIEPIMATGDNEKAAQGAAEDLGIEYRSNQSPQDKYELVKTLKDEGKKVIMVGDGVNDAPSLALADVGIAVGAGTQVALDSADVILTQSDPGDIESFIELAHKTTRKMKQNLFWGAGYNFIAIPLAAGILAPIGITLSPALGAILMSVSTVIVAINAILLSLDPKNNG

SEQ ID NO: 5999 - DNA, 2181 bp, Alloiococcus otitidis; identical to SEQ ID NO: 5997
  CDS (79)..(2178)

SEQ ID NO: 6000 - protein, 700 aa, Alloiococcus otitidis
MKNNNKHSSHSHHNHGDMNHSKHEHVSTEEHRDHNKDQHHDHHAGHDHGGHSGHEHHHGNFKELFLKSLPLGIIIMLLSPMAGFDLPFQFTFPYSDIVVAILSTILIIYGGRPFYQGAVDEFKQKEPGMMALVSLGLSVSYLYSIYTVIASYVTGEQIMDFFFEFASLLLIMLLGHWIEMKAIGEAGDAQEELAKLVPKDAHVVLEDDSIETRPVADLKVGDLIRVQAGENVPADGTIERGESRLNEALLTGESKSIKKGPGDEVIGGSTNGEGVLYIKVLETGDKSFISQVQNLISQAQSQPSRAENIAQKVAGWLFYIAVTVALIAFVVWTLIADIPTSVKFAITTLVIACPHALGLAIPLVTARSTSLGASRGLLVKDRESLEIAQGADVMILDKTGTLTTGEFKVLDVELFNEKYTKEEIIALLAGIEGGSSHPIAQSIISFADQEGVSPVSFDFIDVISGAGVEGKANGHRYQLVSQKAYGRNLDMDIPKGATLSVLVENDEAIGAVALGDKLKATSKDLIEALKNNNIEPIMATGDNEKAAQGAAEDLGIEYRSNQSPQDKYELVKTLKDEGKKVIMVGDGVNDAPSLALADVGIAVGAGTQVALDSADVILTQSDPGDIESFIELAHKTTRKMKQNLFWGAGYNFIAIPLAAGILAPIGITLSPALGAILMSVSTVIVAINAILLSLDPKNNG

SEQ ID NO: 6001 - DNA, 2181 bp, Alloiococcus otitidis; identical to SEQ ID NO: 5997
  CDS (34)..(2178)

SEQ ID NO: 6002 - protein, 715 aa, Alloiococcus otitidis
MNAIYIIRENKEELKMKNNNKHSSHSHHNHGDMNHSKHEHVSTEEHRDHNKDQHHDHHAGHDHGGHSGHEHHHGNFKELFLKSLPLGIIIMLLSPMAGFDLPFQFTFPYSDIVVAILSTILIIYGGRPFYQGAVDEFKQKEPGMMALVSLGLSVSYLYSIYTVIASYVTGEQIMDFFFEFASLLLIMLLGHWIEMKAIGEAGDAQEELAKLVPKDAHVVLEDDSIETRPVADLKVGDLIRVQAGENVPADGTIERGESRLNEALLTGESKSIKKGPGDEVIGGSTNGEGVLYIKVLETGDKSFISQVQNLISQAQSQPSRAENIAQKVAGWLFYIAVTVALIAFVVWTLIADIPTSVKFAITTLVIACPHALGLAIPLVTARSTSLGASRGLLVKDRESLEIAQGADVMILDKTGTLTTGEFKVLDVELFNEKYTKEEIIALLAGIEGGSSHPIAQSIISFADQEGVSPVSFDFIDVISGAGVEGKANGHRYQLVSQKAYGRNLDMDIPKGATLSVLVENDEAIGAVALGDKLKATSKDLIEALKNNNIEPIMATGDNEKAAQGAAEDLGIEYRSNQSPQDKYELVKTLKDEGKKVIMVGDGVNDAPSLALADVGIAVGAGTQVALDSADVILTQSDPGDIESFIELAHKTTRKMKQNLFWGAGYNFIAIPLAAGILAPIGITLSPALGAILMSVSTVIVAINAILLSLDPKNNG

SEQ ID NO: 6003 - DNA, 1395 bp, Alloiococcus otitidis
  CDS (19)..(1392)
acaaggttaggtgaaagcatgtcgaaaagaaatattcctgttgagaaaaatcaaaattaccgcgctgtcgtcgaagattacacccatgaaggttggggcgtggctaagattgagggatatcctattttcattgaaggcgctatggaaggcgaagaggtcactttcaaggtgttcaagtcaggaaagagttttgctcaagggagactgactgatatccaccaagcaagtccggaccgggtacctattcaagacccagtttacgctcaaacagggaccatggatttggcccatatgtcctatcctgcccagctgaagtttaagcaaggccaggtagaaaatgccctccgcaagatcggtaacttgacagaagtccaagtccaagagaccctaggcatggagagtccataccgctaccgcaacaaggcccaagtaccagttagggcagacaaccaggggcatttggtgaccggagcttttcgcaaaaagagtcacgaccttattcccatagaagacttcctcattcaagatccggttattgaccaaaccatcatccaagtccggcaaactttagaaaaatacgggattaaagcatatgatgaccggaaaaataccggccatattcgtcatatcttggttagacggggacactttaccggtgatatcatggtggtattggtgacccgaacacccaagctcccccacaagcaggaaattgtaggggacttggaggcaaccgtagctcagctggtttctgtcgttcaaaatatcaaccctaagaaaaccaacctggtccttggtcgcaagtcccaagtcctttacagacaggacagttaccgggacagggtattgaacctggaattcaatatttcccaccagtcctttttccaagtgaattctaagcaaacggaggccctctatcgaacagccattgatctggctgatatccaagctggtgaccaaattgtggatgcttattgtgggatcggcaccttgaccctatctcttgccaaagaggcagaccaggtttatggggtagaagtggtgcctcaagctgtttcagatgccattaaaaatgcagacctgaaccaaattaaaaatgtccacttcgtccaggtcaaggcagaaaaatggctggtagaccaagccaagataggcatgcatgctgatttaatttttgtcgacccaccacgcaagggtttagattctgcttttatcgaagctgccatacaagttagaccccgccaaatcatctatatttcttgcaatccgggaactttagcccgcgacctcaacaaattcacagaggcaaactaccagcttagccaagtccagccgattgacatgtttccacagacccaccatgtggagacggtggtattgatgacaagaaaatag

SEQ ID NO: 6004 - protein, 458 aa, Alloiococcus otitidis
MSKRNIPVEKNQNYRAVVEDYTHEGWGVAKIEGYPIFIEGAMEGEEVTFKVFKSGKSFAQGRLTDIHQASPDRVPIQDPVYAQTGTMDLAHMSYPAQLKFKQGQVENALRKIGNLTEVQVQETLGMESPYRYRNKAQVPVRADNQGHLVTGAFRKKSHDLIPIEDFLIQDPVIDQTIIQVRQTLEKYGIKAYDDRKNTGHIRHILVRRGHFTGDIMVVLVTRTPKLPHKQEIVGDLEATVAQLVSVVQNINPKKTNLVLGRKSQVLYRQDSYRDRVLNLEFNISHQSFFQVNSKQTEALYRTAIDLADIQAGDQIVDAYCGIGTLTLSLAKEADQVYGVEVVPQAVSDAIKNADLNQIKNVHFVQVKAEKWLVDQAKIGMHADLIFVDPPRKGLDSAFIEAAIQVRPRQIIYISCNPGTLARDLNKFTEANYQLSQVQPIDMFPQTHHVETVVLMTRK

SEQ ID NO: 6005 - DNA, 108 bp, Alloiococcus otitidis
  CDS (1)..(105)
atgctttcacctaaccttgtttatttagtgtgggtagacggggcttggttcaaatggatggaagttaattttagaatctatttaatcgggcgagtcgtgatcaagtag

SEQ ID NO: 6006 - protein, 35 aa, Alloiococcus otitidis
MLSPNLVYLVWVDGAWFKWMEVNFRIYLIGRVVIK

SEQ ID NO: 6007 - DNA, 1071 bp, Alloiococcus otitidis
  CDS (169)..(1068)
gtttacttgggaggaggatcccaaatgaccaaaagagcgaggttaatttataatcccaagtcgggtagggagcaggtccaaaaacacttgcccaagctccttcaagtctatgaagaagcgggttacgaaacttcttgcttccagaccagcccggaacctttttcagccatgaaagaagctagaaggtgtgggcaggaaggcttcgacttaattgtagctgctggcggtgatgggaccattaacgaggtagtaaccggtattgctaaactccctgtcagaccccgcttggccattttgccagccgggaccaccaatgactttgcccgagccttgcggattcctcgggacaacttggttaaggccgctaaggtgatccaaaaagatgatagcatcttgatggatattggccaagccagtttagaaacagatgatggacctaaaagcaagtactttatgaatatagctgcagccgggtccatgaccgaattaacctacgaagtctcctcccagcagaaatccatgtttggctctttagcctacttcctcaaaggggctgaaatgctaccccgcttgaacgggactccgctcaagattgaatacgacgatggaatctatgatggggaagcttcggtcgtctttgttaccctcaccaattcggttggcggtttcgaaaaaattgctcccgacaccgtgatgggggatggcaagttcactttaattattgtgacgacctccaaccttgtggaactgactgacctggcccggaaattactccgagggggcaagcacattcatgacccccagattatctataccaaaaccaacagtgtccggatcgactgtcaaaacgaccacaagctcctgatcaacctagatggggagttaggtgggcatgccccagttttttttgaatgtgtccaacaacacatttcatttgtggcagacacagaggctatccaagcccggacttcgattaagagcccacaagaagtccagctagaaaaagaactcaccaaccaggtcttagaatccctggactatatcgatagtaatgacccagaccatgactaa

SEQ ID NO: 6008 - protein, 300 aa, Alloiococcus otitidis
MKEARRCGQEGFDLIVAAGGDGTINEVVTGIAKLPVRPRLAILPAGTTNDFARALRIPRDNLVKAAKVIQKDDSILMDIGQASLETDDGPKSKYFMNIAAAGSMTELTYEVSSQQKSMFGSLAYFLKGAEMLPRLNGTPLKIEYDDGIYDGEASVVFVTLTNSVGGFEKIAPDTVMGDGKFTLIIVTTSNLVELTDLARKLLRGGKHIHDPQIIYTKTNSVRIDCQNDHKLLINLDGELGGHAPVFFECVQQHISFVADTEAIQARTSIKSPQEVQLEKELTNQVLESLDYIDSNDPDHD

SEQ ID NO: 6009 - DNA, 1071 bp, Alloiococcus otitidis; identical to SEQ ID NO: 6007
  CDS (25)..(1068)

SEQ ID NO: 6010 - protein, 348 aa, Alloiococcus otitidis
MTKRARLIYNPKSGREQVQKHLPKLLQVYEEAGYETSCFQTSPEPFSAMKEARRCGQEGFDLIVAAGGDGTINEVVTGIAKLPVRPRLAILPAGTTNDFARALRIPRDNLVKAAKVIQKDDSILMDIGQASLETDDGPKSKYFMNIAAAGSMTELTYEVSSQQKSMFGSLAYFLKGAEMLPRLNGTPLKIEYDDGIYDGEASVVFVTLTNSVGGFEKIAPDTVMGDGKFTLIIVTTSNLVELTDLARKLLRGGKHIHDPQIIYTKTNSVRIDCQNDHKLLINLDGELGGHAPVFFECVQQHISFVADTEAIQARTSIKSPQEVQLEKELTNQVLESLDYIDSNDPDHD

SEQ ID NO: 6011 - DNA, 1071 bp, Alloiococcus otitidis; identical to SEQ ID NO: 6007
  CDS (7)..(1068)

SEQ ID NO: 6012 - protein, 354 aa, Alloiococcus otitidis
MGGGSQMTKRARLIYNPKSGREQVQKHLPKLLQVYEEAGYETSCFQTSPEPFSAMKEARRCGQEGFDLIVAAGGDGTINEVVTGIAKLPVRPRLAILPAGTTNDFARALRIPRDNLVKAAKVIQKDDSILMDIGQASLETDDGPKSKYFMNIAAAGSMTELTYEVSSQQKSMFGSLAYFLKGAEMLPRLNGTPLKIEYDDGIYDGEASVVFVTLTNSVGGFEKIAPDTVMGDGKFTLIIVTTSNLVELTDLARKLLRGGKHIHDPQIIYTKTNSVRIDCQNDHKLLINLDGELGGHAPVFFECVQQHISFVADTEAIQARTSIKSPQEVQLEKELTNQVLESLDYIDSNDPDHD

SEQ ID NO: 6013 - DNA, 369 bp, Alloiococcus otitidis
  CDS (13)..(366)
gttaattcggtcatggacccggctgcagctatattcataaagtacttgcttttaggtccatcatctgtttctaaactggcttggccaatatccatcaagatgctatcatctttttggatcaccttagcggccttaaccaagttgtcccgaggaatccgcaaggctcgggcaaagtcattggtggtcccggctggcaaaatggccaagcggggtctgacagggagtttagcaataccggttactacctcgttaatggtcccatcaccgccagcagctacaattaagtcgaagccttcctgcccacaccttctagcttctttcatggctgaaaaaggttccgggctggtctggaagcaagaagtttcgtaa

SEQ ID NO: 6014 - protein, 118 aa, Alloiococcus otitidis
MDPAAAIFIKYLLLGPSSVSKLAWPISIKMLSSFWITLAALTKLSRGIRKARAKSLVVPAGKMAKRGLTGSLAIPVTTSLMVPSPPAATIKSKPSCPHLLASFMAEKGSGLVWKQEVS

SEQ ID NO: 6015 - DNA, 1449 bp, Alloiococcus otitidis
  CDS (16)..(1446)
aggaggcaagtaaggatgaattttgaaacagttattggattagaagtccacgttgagttaaaaaccaactccaaaatattctcacctgcaccggcccactttggtgcagttccaaacgagaataccaatgaaattgactgggcctacccaggtaccttgccgacaatcaataagggagctattgaatacgggattaaggcagctttagccttaaattgtgatatccaccaagaaacccggtttgaccgtaagcactacttctacccagacaaccctaaagcctaccaagtttctcaatcggagcggccaattggtcacgatggccacatcgatattgaagtcgacggcgaacacaaggccattcggattgaacgggtccacttagaagaagatgctgggaaaaatacccacggcgaggacggttactcgtatgtcgacctcaaccggcaagggactcccttgattgagatcgtttctgaaccggacatccgctcaccccaagaagcctacgcttatttggaaaaattgaagcaaattatccagtacaccggggtatcagatgttaaaatggaagaaggatccatgcggtgtgatgccaatgtttccttaagaccctttggccaagaagagtttggaaccaagaccgagctcaagaacttgaactcctttaacaatgtccgcaaggggcttatcgaagaagtcaaacgtcaggaaaaagaactcttagccggtaagctgatccgccagcaaacccgtcgttatgatgaagattcaggccaaacccggctgatgcggattaaagaagagatggcagactaccgttacctgcctgaagcagacctcccccctctttccatcagtgatgactgggtggactccattcgagactccctgcctgaatttgcggaagaccgccgtaaacgttatgtaaatgacttgggcatttcagaatacgatgccgaagtcctaactgccagcaaggaaatgtcagacttctttaaccaaactgtcgaagctggagctgatcccaaacaagcagccaactggttgatgggggacatttcggcttacttgaacaaggaaaatgtcgaattgtccgatacccaactgaccccagaatcactagcggaaatgatccaattaattgaccaagatactatttcttctaaaatcggtaaaaaagtctaccttgtcttgatcaaagaaggtagctccgatgtccaagctctagtcgaagaaaagggttgggtccaactatctgaccctgctcaattagagccgattattaacgacattttagaccagaaccaacaatccattgaagacttcaaggctggtaaggaccgggcgaaaggcttcttagttggccaagttatgaaagaaacccgtggcaaggccaacccacaagtggtcaaccagttgctcgaccaggagctaaacaaacgctaa

SEQ ID NO: 6016 - protein, 477 aa, Alloiococcus otitidis
MNFETVIGLEVHVELKTNSKIFSPAPAHFGAVPNENTNEIDWAYPGTLPTINKGAIEYGIKAALALNCDIHQETRFDRKHYFYPDNPKAYQVSQSERPIGHDGHIDIEVDGEHKAIRIERVHLEEDAGKNTHGEDGYSYVDLNRQGTPLIEIVSEPDIRSPQEAYAYLEKLKQIIQYTGVSDVKMEEGSMRCDANVSLRPFGQEEFGTKTELKNLNSFNNVRKGLIEEVKRQEKELLAGKLIRQQTRRYDEDSGQTRLMRIKEEMADYRYLPEADLPPLSISDDWVDSIRDSLPEFAEDRRKRYVNDLGISEYDAEVLTASKEMSDFFNQTVEAGADPKQAANWLMGDISAYLNKENVELSDTQLTPESLAEMIQLIDQDTISSKIGKKVYLVLIKEGSSDVQALVEEKGWVQLSDPAQLEPIINDILDQNQQSIEDFKAGKDRAKGFLVGQVMKETRGKANPQVVNQLLDQELNKR

SEQ ID NO: 6017 - DNA, 1527 bp, Alloiococcus otitidis
  CDS (61)..(1524)
ccggaaagacaactttatccaagttccattattagtagaccgacaaggaggcaaggcttaatgacatttgcttacaaaacactggaagaactccaccaagccctagtcaacaaggaaacaagtgctgaggcgattgttcaagacttgtatgaccggattgaccaatttgacggtgacttgggagccttcctacacttaaacaaggaccaggccctagcccaagccaaggaagctgatcaagcagggattgacccagctaatatcttgtccggcctgccaattggggttaaagacaatattgtcaccaaagaccagccgactacagctgcttccaagatgctagaggacttccattcggtctatgacgcaacggtcgtcaaacgcttgaaggaagctggtatgatttccttaggcaagttaaacctggatgaatttgccatggggagttccaatgaaaactcctactttaaaatttgccgcaacccttggaatttaaacaaggttcccggtgggtcatccggtggttcagctgctgcagttgccgctggtttcctcccagcttccttggggaccgacacaggggggtctatccgccaacctgctgcctttaacggaattgttgggatgaaaccaacttacggccgggtctcccgcttcggtctaattgcttttgcttccagtctagaccaaatcggccccttgacccggactgtcaaagacaatgccttggtcttaaatgcgatcagtggccatgaccctcaagatgcaacttcctatcctgaaagtcaagttgactttacccaagggattgaagacggggttgccggtctcaaaattggtgttccccgcaaattatttagagactctgccttaaatgaccaggttatggatgtcatcgaagatgccttggccaagtaccaggccctaggtgctgagttagttgaaattgacttagaccatgccttgtacgggaccccaacctattacattattgcttcttcagaggcagctagtaacttgcaacgctttgacggggtgaaatacggttaccggacagaggaatttaaagacctggatgaactttacattaagagccggtctgaaggctttggtgaagaggttaaacgacgaatcatgttagggactttctccttgtctgctggctatgccgaagaccactttgacaaggcagccaaggtccgaaccctgattaaagaagactttaaaaaagcttttgaaggggtagacgttattttgaccccaaccaccttgaccccagcctttgacatcggtgggaaaattgaagatcctctcagcttgtacaagcaagacacctttactgtttcggtcaacctggctggtattcctgccatgtccatcccatgtggctttgtcgacggtatgccaattggtttgcagttgatcggcaaccacttcgaagaaagactactttaccaagtagcttatgcctacgaacaagcgaccggccaccacacccacacacccagctttgaaggaggcaagtaa

SEQ ID NO: 6018 - protein, 488 aa, Alloiococcus otitidis
MTFAYKTLEELHQALVNKETSAEAIVQDLYDRIDQFDGDLGAFLHLNKDQALAQAKEADQAGIDPANILSGLPIGVKDNIVTKDQPTTAASKMLEDFHSVYDATVVKRLKEAGMISLGKLNLDEFAMGSSNENSYFKICRNPWNLNKVPGGSSGGSAAAVAAGFLPASLGTDTGGSIRQPAAFNGIVGMKPTYGRVSRFGLIAFASSLDQIGPLTRTVKDNALVLNAISGHDPQDATSYPESQVDFTQGIEDGVAGLKIGVPRKLFRDSALNDQVMDVIEDALAKYQALGAELVEIDLDHALYGTPTYYIIASSEAASNLQRFDGVKYGYRTEEFKDLDELYIKSRSEGFGEEVKRRIMLGTFSLSAGYAEDHFDKAAKVRTLIKEDFKKAFEGVDVILTPTTLTPAFDIGGKIEDPLSLYKQDTFTVSVNLAGIPAMSIPCGFVDGMPIGLQLIGNHFEERLLYQVAYAYEQATGHHTHTPSFEGGK

SEQ ID NO: 6019 - DNA, 342 bp, Alloiococcus otitidis
  CDS (37)..(339)
ttaagcaaccagaatgatttgaggaggaagcgaagaatggcaattgatagaagtgccttattccaaagcttggccctggctaagttagagtatgatgattccaaggaagaagagatgttgaaggaaatgcagaaaatcatcgacttcgtggaaagcttagacaaggtcgatgtttcaggcgtgcaaccaacatataatggcaatgacctcaccaccgttttaagagaggacaagccagtgaagtctgatgtgcctgaacaactcttggaaaatgcacctgaccggaaagacaactttatccaagttccattattagtagaccgacaaggaggcaaggcttaa

SEQ ID NO: 6020 - protein, 101 aa, Alloiococcus otitidis
MAIDRSALFQSLALAKLEYDDSKEEEMLKEMQKIIDFVESLDKVDVSGVQPTYNGNDLTTVLREDKPVKSDVPEQLLENAPDRKDNFIQVPLLVDRQGGKA

SEQ ID NO: 6021 - DNA, 342 bp, Alloiococcus otitidis; identical to SEQ ID NO: 6019
  CDS (19)..(339)

SEQ ID NO: 6022 - protein, 107 aa, Alloiococcus otitidis
MRRKRRMAIDRSALFQSLALAKLEYDDSKEEEMLKEMQKIIDFVESLDKVDVSGVQPTYNGNDLTTVLREDKPVKSDVPEQLLENAPDRKDNFIQVPLLVDRQGGKA

SEQ ID NO: 6023 - DNA, 1128 bp, Alloiococcus otitidis
  CDS (46)..(1125)
tttcagaaagtgagggaagcaatgaagagggcaaaattagttaagatgatggtggcagccatgagcttgaccctcttaactgcctgcaatattatccctgaaggagaggaaggcggggagtcaacttcaagcgaagaccaagtgattgaagaagataaggccatccaacaattgggagaggcccaatattaccagcccttgatcgatcaagagggcaactacccggtcagccaaaaccgggggacaacatcccgcttgaattccaatatcaacatgaagttgttcgaagatgacttaatccgcctagcccaagattatttcacagttgaagaccattacttccaagaaggtcagtacatttcctctgacatggtccaaacttggctggaccgggagtcagaagacaaccccgaaggactcaatcctggagatgaggaccaaccccgctacttgaattcagttttagagcatgatttttaccaagttaatgaagacggtaattatcaactggccgggatgagcatcggtcttgccatgaatccagaagacagcgagactgatactgaccaagagattgaccgccagaccttaatcgaccaaggacaagagatggcagataaaatagtggccaaggtcagagatcatgaagatattggggatgacttgccgatcatggtaggaatttttgagcaggcagccaaggatgacttgtccggtggtacctatatccaaaaaggcctcagccaaggcggacctgatgtagctggatgggaagaagtagatgaagaacgcctagtctttccagtacaaggaggcgaaagtccggaagtcaatagctttaagaacttccagtcccaagtggagtcttttttcccaaacttgaacggagtcgttggccgggcccactacattaatgagatattggccgatttacacatccaaattacgacccaattctacggcaggggagagatggcggcttttacctattatctcaatacagctgctatgacctacctaccagagaacatccggatccaaattgtggtcgaatccctcgacggggtggaggccatcttggtccgtgaatccaaccagaatgaatttgtcagccacatatttgattaa

SEQ ID NO: 6024 - protein, 360 aa, Alloiococcus otitidis
MMVAAMSLTLLTACNIIPEGEEGGESTSSEDQVIEEDKAIQQLGEAQYYQPLIDQEGNYPVSQNRGTTSRLNSNINMKLFEDDLIRLAQDYFTVEDHYFQEGQYISSDMVQTWLDRESEDNPEGLNPGDEDQPRYLNSVLEHDFYQVNEDGNYQLAGMSIGLAMNPEDSETDTDQEIDRQTLIDQGQEMADKIVAKVRDHEDIGDDLPIMVGIFEQAAKDDLSGGTYIQKGLSQGGPDVAGWEEVDEERLVFPVQGGESPEVNSFKNFQSQVESFFPNLNGVVGRAHYINEILADLHIQITTQFYGRGEMAAFTYYLNTAAMTYLPENIRIQIVVESLDGVEAILVRESNQNEFVSHIFD

SEQ ID NO: 6025 - DNA, 1128 bp, Alloiococcus otitidis; identical to SEQ ID NO: 6023
  CDS (22)..(1125)

SEQ ID NO: 6026 - protein, 368 aa, Alloiococcus otitidis
MKRAKLVKMMVAAMSLTLLTACNIIPEGEEGGESTSSEDQVIEEDKAIQQLGEAQYYQPLIDQEGNYPVSQNRGTTSRLNSNINMKLFEDDLIRLAQDYFTVEDHYFQEGQYISSDMVQTWLDRESEDNPEGLNPGDEDQPRYLNSVLEHDFYQVNEDGNYQLAGMSIGLAMNPEDSETDTDQEIDRQTLIDQGQEMADKIVAKVRDHEDIGDDLPIMVGIFEQAAKDDLSGGTYIQKGLSQGGPDVAGWEEVDEERLVFPVQGGESPEVNSFKNFQSQVESFFPNLNGVVGRAHYINEILADLHIQITTQFYGRGEMAAFTYYLNTAAMTYLPENIRIQIVVESLDGVEAILVRESNQNEFVSHIFD

SEQ ID NO: 6027 - DNA, 1128 bp, Alloiococcus otitidis; identical to SEQ ID NO: 6023
  CDS (10)..(1125)

SEQ ID NO: 6028 - protein, 372 aa, Alloiococcus otitidis
MREAMKRAKLVKMMVAAMSLTLLTACNIIPEGEEGGESTSSEDQVIEEDKAIQQLGEAQYYQPLIDQEGNYPVSQNRGTTSRLNSNINMKLFEDDLIRLAQDYFTVEDHYFQEGQYISSDMVQTWLDRESEDNPEGLNPGDEDQPRYLNSVLEHDFYQVNEDGNYQLAGMSIGLAMNPEDSETDTDQEIDRQTLIDQGQEMADKIVAKVRDHEDIGDDLPIMVGIFEQAAKDDLSGGTYIQKGLSQGGPDVAGWEEVDEERLVFPVQGGESPEVNSFKNFQSQVESFFPNLNGVVGRAHYINEILADLHIQITTQFYGRGEMAAFTYYLNTAAMTYLPENIRIQIVVESLDGVEAILVRESNQNEFVSHIFD

SEQ ID NO: 6029 - DNA, 2022 bp, Alloiococcus otitidis
  CDS (4)..(2019)
aggatgacgcttgcaaaagatgaagctagagagcggattgaccaactgattccagaattaaaccaatatgcttatgagtattatgccttggaccaaccgactgtccaagatgaggtctatgacaaactctaccgggagctggaagaccttgaaggcgcctaccctgatttaatccaagaagattctcctacccaacgtgtgggagatcaattagcggaaggctttaataaggtcagccatgacacccccatgttaagcttggccaatgcctttaaccggaaagacttgttggactttgatcgcagagttcggagcctaaccgacttagatattgaatacgaagttgagcttaagattgacggcctagcagtatccttaaaatatgaccaaggtcggctagttcagggtgccacccggggtgatgggaatatcggtgaagacatcacggccaatatcaaggctatccaagccatccccctaaggttgcaagaagccattagcctggaggccaggggtgaggtctatatgcccaaaggaagcttcttaaagctcaaccaaggccgggaagaagaggggcaggccctctttgccaatcccaggaatgcggctgccggcaccttgcgtaatttagatcccaaggtaacagctaagcggcagctcaatgtcttcctttacggcctggtcagccaggaatctttaaccattgaccagcaagaccagtctctggactaccttacctccatcggcctccggaccaatcctgaacgcaaggtttactctagtatggaaaaagtcattgactacatcgaaaactttcaggccaaaagatccagcttggcttatgagattgacggagtggtcatcaaggtcaatgactttaaggctcaagaagagattggctacaccgtcaaggcccccaagtgggcgattgcctacaagtttccagcagaagaagcccataccaaattgcacgacattgaatggaccttgggccggacaggggtcgtcaccccaactgccgtgatggacccagtccaattggccgggaccacggtcaaacgggccagcctccacaatgccgacttgatcaaggaaaaagatgttcggctaaaagacacggtggtggtccgcaaggcgggggatattatcccagaagtggtccgggtagacttagatcaaagaccagaggatagcaagccctaccccataccgactaaatgcccagtttgccaaggagaattagtccacctagaagacgaagtggccctccgatgtatgaacccccaatgcccggcccaggtcttggaaaaagccaaccactttgtctcccgcaatgccatgaatatagatggcttgggacaaaaattgattgagcaattatttaaccaggacttagtccaagatactggggacctctactacctcaaaaaagaagacttaatggccttagaccgggttggcgacaagtcagccagcaagctactggatgccattgaaaactccaaatccaactccttggagcgtttactctttggcttgggcatccgccatgttgggtccaaggcagcccggctaatagctgaagaattcaagaccatggaccgggtgcgggaagcaagcgtccaagacctaacccaaattgatggcatgggccaagtgattgctgatagcctggtggaatactttaaactagaagaaagtcaggccttaatcgacaagttcgctcaggccggcctcaatatggactatattccagcccggtccttagaagaaaatgacctgtctgaatcaacccaggtctttgccggcaagaccattgtcctaaccggtaagctaagccagttcaatcggaatgaactcaaagagatcctgactgaactaggggccaatgtgaccggcagtgtgtctaaaaataccgacttggtcatagctggatcagatgctgggtctaagctggacaaggcccaggaattaggagtagagacctgggatgaggaccaactactagaagagttaaactag

SEQ ID NO: 6030 - protein, 672 aa, Alloiococcus otitidis
MTLAKDEARERIDQLIPELNQYAYEYYALDQPTVQDEVYDKLYRELEDLEGAYPDLIQEDSPTQRVGDQLAEGFNKVSHDTPMLSLANAFNRKDLLDFDRRVRSLTDLDIEYEVELKIDGLAVSLKYDQGRLVQGATRGDGNIGEDITANIKAIQAIPLRLQEAISLEARGEVYMPKGSFLKLNQGREEEGQALFANPRNAAAGTLRNLDPKVTAKRQLNVFLYGLVSQESLTIDQQDQSLDYLTSIGLRTNPERKVYSSMEKVIDYIENFQAKRSSLAYEIDGVVIKVNDFKAQEEIGYTVKAPKWAIAYKFPAEEAHTKLHDIEWTLGRTGVVTPTAVMDPVQLAGTTVKRASLHNADLIKEKDVRLKDTVVVRKAGDIIPEVVRVDLDQRPEDSKPYPIPTKCPVCQGELVHLEDEVALRCMNPQCPAQVLEKANHFVSRNAMNIDGLGQKLIEQLFNQDLVQDTGDLYYLKKEDLMALDRVGDKSASKLLDAIENSKSNSLERLLFGLGIRHVGSKAARLIAEEFKTMDRVREASVQDLTQIDGMGQVIADSLVEYFKLEESQALIDKFAQAGLNMDYIPARSLEENDLSESTQVFAGKTIVLTGKLSQFNRNELKEILTELGANVTGSVSKNTDLVIAGSDAGSKLDKAQELGVETWDEDQLLEELN

SEQ ID NO: 6031 - DNA, 282 bp, Alloiococcus otitidis
  CDS (52)..(279)
ctttcttctagtttaaagtattccaccaggctatcagcaatcacttggcccatgccatcaatttgggttaggtcttggacgcttgcttcccgcacccggtccatggtcttgaattcttcagctattagccgggctgccttggacccaacatggcggatgcccaagccaaagagtaaacgctccaaggagttggatttggagttttcaatggcatccagtagcttgctggctgacttgtcgccaacccggtctaaggccattaagtcttcttttttgaggtag

SEQ ID NO: 6032 - protein, 76 aa, Alloiococcus otitidis
MPSIWVRSWTLASRTRSMVLNSSAISRAALDPTWRMPKPKSKRSKELDLEFSMASSSLLADLSPTRSKAIKSSFLR

SEQ ID NO: 6033 - DNA, 2244 bp, Alloiococcus otitidis
  CDS (22)..(2241)
ttacgtgaaaggaagacttgcatgggcctagcaaaagatattttaggcaaaatgaatgacaaacaaaaacaagcggtcatgaccactgatggccctctcttgatcatggctggggcaggatctggcaagacccgggtcttaacccaccggatagcttacttgatccaagaaaaaggggttaatccttggaatatcttagccatcacctttaccaacaaggcggctggcgagatgaaagaccgggtccagaaactggttagccagggaggatctggagtttgggtctcgactttccactctatgtgtgttcgcattctaagaagggacggggaccaaattggctataaccgtgccttcaccattgctgaccctagtgaacagaaaagtttgatgaagcaggtcttaaaagacttgaatattgatcctaaacgttacaaccccaaggcgatattggccgagatttccaatgccaaaaatgacctcttggatgagcaaacctaccggaaacaagctgatgactattttaaggaagtggtggctgactgctacgatgcttaccaaagacagctccgccagtctgaggccatggactttgacgacctgattatgcaaaccgtccgtctcttcaaggaaaagcccgataccctgtcttactaccaggccaagttccagtatatccatgttgacgaataccaggataccaaccaagcccaataccaactggttcaactgctagcccaacgctttaaaaatgtttgcgtcgtgggagatgctgaccagtctatttatggttggcggggggctgatatgggaaatattttgaatttcgaaaaagactatccagaagcccaaaccatctttttggaacaaaattaccggtcaaccaagtctataatcagggcagccaatgatgttatccaaaacaatatcaaccgccgggacaagaatttgtggactgccaacgatgagggggacaaggtcagcttatacgctgcccggagcgagcaggatgaagcccagtttatcgtagggaccatccatgacctaacagaaggcaaaaaggctggctatggggacatcgccatcctctaccggaccaatgccatgtcccgggttattgaagaaacctttatcaagtcgaatatcccctacaagatcgtcggcggaaccggcttttaccaaagaaaagaaatccgtgacctgattgcctacctaaccctagtggctaacccagctgatgacctgtccttttcacggatcgttaatgagcccaaaagagggattggacccggcaccctggacaagttacgccaggctggccaggagatgggttggtcgctttacgaaacagctctcaatgcggatgctaccaacctgcctagtcgggctgtcaacagactattagacttcagtcaaatgattgaaaatttcaggaaaatgacggaatacttaccgattactgatttgaccgaaaaaatcttagaggatactggctaccaaaaagccttagaaaaagaccggactcttgaatctcaggcaaggttagagaacctacaggaattttactccgtcacccaggaatttgaccagcaagaagacgacaacaagtcactcttagccttcttaactgacctttccttattgtcaccagctgatgatgttgaagagggtcggggccaggtcaccatgatgaccctccatgcagccaaggggttggaattcccctatgtctttatcgctggtatggaagagggaatcttccccttgtcccgggcggctgaagacccggaaagcttggaagaagagcgacgactggcctatgtagggattacccgggctgagcaggccctctacctaacccgtgccatgatgcgccaactctatggccggacccaggctaatcccaaatctcgctttttatctgaaatttcttctgacctggtccaagaccttggtgctacaactgggtctcttagccagactggggggaaagttagccctagactaggaggccgcaaagccagtggttataaggctaatgcttggtctcagcaatcagttggggcgactggggctgaaaaagaagactgggaagttggtgacaaggtccaccacaaaaaatggggccaaggaaccattattgagattaaaggttctggctcggacctccagctcaacattgcctttccagatgaagggatcaagcccttgctagccagttttgcccccatcgaaaagatttag

SEQ ID NO: 6034 - protein, 740 aa, Alloiococcus otitidis
MGLAKDILGKMNDKQKQAVMTTDGPLLIMAGAGSGKTRVLTHRIAYLIQEKGVNPWNILAITFTNKAAGEMKDRVQKLVSQGGSGVWVSTFHSMCVRILRRDGDQIGYNRAFTIADPSEQKSLMKQVLKDLNIDPKRYNPKAILAEISNAKNDLLDEQTYRKQADDYFKEVVADCYDAYQRQLRQSEAMDFDDLIMQTVRLFKEKPDTLSYYQAKFQYIHVDEYQDTNQAQYQLVQLLAQRFKNVCVVGDADQSIYGWRGADMGNILNFEKDYPEAQTIFLEQNYRSTKSIIRAANDVIQNNINRRDKNLWTANDEGDKVSLYAARSEQDEAQFIVGTIHDLTEGKKAGYGDIAILYRTNAMSRVIEETFIKSNIPYKIVGGTGFYQRKEIRDLIAYLTLVANPADDLSFSRIVNEPKRGIGPGTLDKLRQAGQEMGWSLYETALNADATNLPSRAVNRLLDFSQMIENFRKMTEYLPITDLTEKILEDTGYQKALEKDRTLESQARLENLQEFYSVTQEFDQQEDDNKSLLAFLTDLSLLSPADDVEEGRGQVTMMTLHAAKGLEFPYVFIAGMEEGIFPLSRAAEDPESLEEERRLAYVGITRAEQALYLTRAMMRQLYGRTQANPKSRFLSEISSDLVQDLGATTGSLSQTGGKVSPRLGGRKASGYKANAWSQQSVGATGAEKEDWEVGDKVHHKKWGQGTIIEIKGSGSDLQLNIAFPDEGIKPLLASFAPIEKI

SEQ ID NO: 6035 - DNA, 711 bp, Alloiococcus otitidis
  CDS (67)..(708)
gccggattaaagtccgcttcccttgccaaaagcaaggctaaaaataaagggaaaaggatacttgctatgggtaaaaagaaagctttagagcagaccgtttatgactttgtagaagacaagatcaaggccaaggattggctacccaaacagcatattaaagaaatggatgttgccaaggccttagacatcagccggacgccgatcagaggggcctttaaacgcttggaagcagatggaatcttaaaaattgtcccctacaagggggcagagattctagagcccgaaattgactcttctgcctttcaggagaggaccaatttcttggaagttctggttagctaccacttccaaaccctagagttagatgaggtcgactttgacacggacggcctgaaagaaacttatgataagatggctgatgataagtttggtgaccaggacctcttcgaagacagggaagtggacttttggcatgatcttctgcaatactgccgcaatagctacatgcgagggatgatgctagacactttgcggtatatcctgcccaagactggtcacttgaaatccattatccaggccagccgggacaagaaactcaagcattaccagtttgtgattgactatctggaagacaataactacccttatgtcagacgggagcttcggatcttgtttaaccagcttaatatgaacgttattcaaggtgtgtaa

SEQ ID NO: 6036 - protein, 214 aa, Alloiococcus otitidis
MGKKKALEQTVYDFVEDKIKAKDWLPKQHIKEMDVAKALDISRTPIRGAFKRLEADGILKIVPYKGAEILEPEIDSSAFQERTNFLEVLVSYHFQTLELDEVDFDTDGLKETYDKMADDKFGDQDLFEDREVDFWHDLLQYCRNSYMRGMMLDTLRYILPKTGHLKSIIQASRDKKLKHYQFVIDYLEDNNYPYVRRELRILFNQLNMNVIQGV

SEQ ID NO: 6037 - DNA, 780 bp, Alloiococcus otitidis
  CDS (46)..(777)
ttgagcgttaccaacttgaccaatatgaccatctatcatcataggatgatagggatagaggaaggaagtaaaaaaatgactgaacatgtcgtaaaaaagcgaaaacaaattcccgaaataaccaccaacctacgcaaggactatattaaagtccctgacaagatccggaatgcttctggtatcaaaattatgggacggcggattaagtccattcttttcaccactgatattgcgattatcttaaataataatgccgatgccatcttagccgtctatcctttcaccccccatccagccatcattgaagccattgcttccacttccaatctcccagtcttagccggggtcgggggtggtttgaccaagggacagcggtctaaagacatggccctctttgctgaagccaatggctgtaccgcggtggttttgaatgctccaacccaactggataccatccgtttggtcgatgaggtagtagacagcccaattatcaagaccattgtatcggaacatacggacattgaagccaaccttaaggccggggttgatattttaaatgtctcctgtgccaataaaacggctgaagtggttgggaaaatccgggaaaaattctcagatgtcccgattatcgctactggtggtccgacagatgaagacatccaagagacgatcgatgccggcgccaacgcgattacctacaccccgccttcgaacggggagctctttagtaaaaaaatggacaagtaccgggaaaaaattgaaggggagccaagtctttaa

SEQ ID NO: 6038 - protein, 244 aa, Alloiococcus otitidis
MIGIEEGSKKMTEHVVKKRKQIPEITTNLRKDYIKVPDKIRNASGIKIMGRRIKSILFTTDIAIILNNNADAILAVYPFTPHPAIIEAIASTSNLPVLAGVGGGLTKGQRSKDMALFAEANGCTAVVLNAPTQLDTIRLVDEVVDSPIIKTIVSEHTDIEANLKAGVDILNVSCANKTAEVVGKIREKFSDVPIIATGGPTDEDIQETIDAGANAITYTPPSNGELFSKKMDKYREKIEGEPSL

SEQ ID NO: 6039 - DNA, 780 bp, Alloiococcus otitidis; identical to SEQ ID NO: 6037
  CDS (25)..(777)

SEQ ID NO: 6040 - protein, 251 aa, Alloiococcus otitidis
MTIYHHRMIGIEEGSKKMTEHVVKKRKQIPEITTNLRKDYIKVPDKIRNASGIKIMGRRIKSILFTTDIAIILNNNADAILAVYPFTPHPAIIEAIASTSNLPVLAGVGGGLTKGQRSKDMALFAEANGCTAVVLNAPTQLDTIRLVDEVVDSPIIKTIVSEHTDIEANLKAGVDILNVSCANKTAEVVGKIREKFSDVPIIATGGPTDEDIQETIDAGANAITYTPPSNGELFSKKMDKYREKIEGEPSL

SEQ ID NO: 6041 - DNA, 780 bp, Alloiococcus otitidis; identical to SEQ ID NO: 6037
  CDS (1)..(777)

SEQ ID NO: 6042 - protein, 259 aa, Alloiococcus otitidis
MSVTNLTNMTIYHHRMIGIEEGSKKMTEHVVKKRKQIPEITTNLRKDYIKVPDKIRNASGIKIMGRRIKSILFTTDIAIILNNNADAILAVYPFTPHPAIIEAIASTSNLPVLAGVGGGLTKGQRSKDMALFAEANGCTAVVLNAPTQLDTIRLVDEVVDSPIIKTIVSEHTDIEANLKAGVDILNVSCANKTAEVVGKIREKFSDVPIIATGGPTDEDIQETIDAGANAITYTPPSNGELFSKKMDKYREKIEGEPSL

SEQ ID NO: 6043 - DNA, 723 bp, Alloiococcus otitidis
  CDS (100)..(720)
aaaataaaaatttgtccacctaaaagtagggttttaggtggacatttttatgtcactatcgttaaaataaatgagtcaagaaaggactgggggaaagtcatgtcaagctatcaagaacgaaaaaagaagggtaaggcaaaagatcgagctttcctggcctttttgctaagcctgactttggttttgatctttgcctttgtttacttgggccatgctctgggattcagtggcccaaaaggatcagatgaggcacccttgccagctgaccaggcctttatccaagcaatggttccaggctcccaagccctccaggaagaatatggggtcctgcccagtatcatgatttcccaagcaattttggaatccgattggggcgagagtgacttggctaagcaggaaaacaactattttggccggaaagactcccaggatggggtttattacatgaccaaagaatacaaaggccagtgggaagaccaaaaagagccttttaaggtttatgattcgctggaagaatcaatgttggaccatgctcgtttactggcttatggaacttcttgggaccccaagctctaccaaggagtcatccaagcacctgactataaaagcgctgcctatgccctccaagaagccggttatgccactgaccccaactatgctcaaaaattgattaatctgattgagcgttaccaacttgaccaatatgaccatctatcatcatag

SEQ ID NO: 6044 - protein, 207 aa, Alloiococcus otitidis
MSSYQERKKKGKAKDRAFLAFLLSLTLVLIFAFVYLGHALGFSGPKGSDEAPLPADQAFIQAMVPGSQALQEEYGVLPSIMISQAILESDWGESDLAKQENNYFGRKDSQDGVYYMTKEYKGQWEDQKEPFKVYDSLEESMLDHARLLAYGTSWDPKLYQGVIQAPDYKSAAYALQEAGYATDPNYAQKLINLIERYQLDQYDHLSS

SEQ ID NO: 6045 - DNA, 276 bp, Alloiococcus otitidis
  CDS (37)..(273)
ttcttccagcgaatcataaaccttaaaaggctctttttggtcttcccactggcctttgtattctttggtcatgtaataaaccccatcctgggagtctttccggccaaaatagttgttttcctgcttagccaagtcactctcgccccaatcggattccaaaattgcttgggaaatcatgatactgggcaggaccccatattcttcctggagggcttgggagcctggaaccattgcttggataaaggcctggtcagctggcaagggtgcctcatctga

SEQ ID NO: 6046 - protein, 79 aa, Alloiococcus otitidis
MVFPLAFVFFGHVINPILGVFPAKIVVFLLSQVTLAPIGFQNCLGNHDTGQDPIFFLEGLGAWNHCLDKGLVSWQGCLI

SEQ ID NO: 6047 - DNA, 2823 bp, Alloiococcus otitidis
  CDS (1336)..(2820)
tcatgcgtgtttaataaagccctaatcaaagatactcttagggaaatatggaataccaaaagccggtttatctccatatttgccattatccttatcggggttgcctttttctccggcttggtggcaactagccccgtcatgatcgaaacagctaataattactataatgaacaaaacttggctgatatgcaggttatctctcctttcggttataccgaggaagacattgacgagttcagccaagtccgcgatgcaacagtggacgttcacaagacggtggatgtcttagatgacgaaaaccgggcctttcgcttgtttggttatagtgaagaccatgagcttaatgactatcttgtcttagaaggacggcttccggaagagccaaacgaaattgccctagacagtaaggatgacttcctccaagaatttgatatcggcgatacatttagcctggaaacagatgctagttttgacaacacagccaatgtcaatgaagaggaatttgaaatagtcggttttgtccaaacccctatgtatgtcgaagatgaaactcgagggacaacagccattggtgctggggttttagaaggttttggtgtcgtcacagaagacgccattgacctcgaagaaagtaacctagttcacttgaaatttgacgaattgagccaaggccgcgatgtctacagtgaagactatcagaatgaaattgatgacatccaagaagaatacgaagatgttttcaatgaccgagcggaagaaagaaagcaagacatgatcaaccaggctcaagaagagcttgatgaaggacgtaatcaaattcaagaagctgaagaccagctagaagaaggtcggcaagccttggaagaagcaaggactcaacttgaccaggccaaggaagaaataggagaccaggaaagccaacttcaagcggcggctgccctttacggtcctaattcagaactagtcttagccggccaggcccagctggaagaagctcaaaaccagatccaagaagctgaagaggaatatgaaagcaatctagcagaatttgaagaagctgaagcagaagcccaagaagagctagaggatgcccgggctcagcttgaagaaggcgaagaagagttggctgaatttgaagagaccaatgcttccatgttctacaatacctctctcgacttccctggtgtcaatgagtacggtgagaacgccgaccgaatccaggctatttcccgtgtcttccctgttttcttctttgctttagccatcttaatttccctcactaccatgtctcgtattgtcaatgagggacgaacccagatcgggaccatgaaggctttgggttataataatactcaaatttctgctaagtatttcacttatgccctcttagcgaccgtcctaggtggagttatcggtctccctcttggcttctggttgttcccaaccgttattgtcaatgcctatgaagcggcctaccagcttattgacgctcagatttccttctatcctggcattgctgccattgcctttgtaggtgcagttttagcaaccagtattgctacctttgcctccttgcggtccatgctcaaagaaaacgcggcttccctcttgcgccctaaagcaccgaagagtggtcaacgcatcttccttgagcgaatttcatggatttgggaccgacttggttttatccaaaaagtttctgtccgtaacctcttccgctacaagggtcgtttgtttatgaccatcatcggggttgccggtggggtggctttgatgctgaccggttttggcctatatgactccattcaagggattggtgaattgcagtttaatgaaatttccaactacgacgctatttcagttgtggacaccaatgccgaagaagaccaggttgatgaagtcgaagatactatttccgattcagacttaaccgaggactttatccgggtctcaactcaaaccatgaccctacaagatgaccaaactgaccaagagcttagtttgatgatcccggaaagtgctgaagaactagaagactatatggaactccaagactacgataccgatgaaagactggctttacctgaggacggggccttggtcacccagaaaatagccgagttagaagatatttccatcggtgataccttcatcttggaagactatgaaaaccaagaatatgaagtggaagtagccggtattgtcaacaactacgtggcccactatgtctacgttagccccgaatactggaagactgtctcagatgaagattatgactttgacacccgcctgattcgctatgatcaaaatgctgaggtcactgcagaagctgaaggagaatttgaagaccagttagttgacctggatgccactttagcggttaacttaatgaccgagaacttgcaaacggtcgaggactccctatcggccctctccactgtgatggttgtcttgatcctatctgctgccatcctagcctttgtcgtcctctacaacgtcactaacatcaatgtcagcgaacgggttgaagaactctccaccatcaaggttttaggtttctttgatatggaagtcacccgctatgtttaccgcgaaacctttaccctatccatcatgggtattttggtcggactaatcttcggtttcttcttgcaccaatatattatcgaaaccgtcgagctaaactacattatgtttagccggactatcttatggccaagctacctctactcagcaggactcatggtgatcttctccattattgtcatggttatcatgcacttcaagctgaaaagcattgatatggtagaggctttgagctaa

SEQ ID NO: 6048 - protein, 495 aa, Alloiococcus otitidis
MGYNNTQISAKYFTYALLATVLGGVIGLPLGFWLFPTVIVNAYEAAYQLIDAQISFYPGIAAIAFVGAVLATSIATFASLRSMLKENAASLLRPKAPKSGQRIFLERISWIWDRLGFIQKVSVRNLFRYKGRLFMTIIGVAGGVALMLTGFGLYDSIQGIGELQFNEISNYDAISVVDTNAEEDQVDEVEDTISDSDLTEDFIRVSTQTMTLQDDQTDQELSLMIPESAEELEDYMELQDYDTDERLALPEDGALVTQKIAELEDISIGDTFILEDYENQEYEVEVAGIVNNYVAHYVYVSPEYWKTVSDEDYDFDTRLIRYDQNAEVTAEAEGEFEDQLVDLDATLAVNLMTENLQTVEDSLSALSTVMVVLILSAAILAFVVLYNVTNINVSERVEELSTIKVLGFFDMEVTRYVYRETFTLSIMGILVGLIFGFFLHQYIIETVELNYIMFSRTILWPSYLYSAGLMVIFSIIVMVIMHFKLKSIDMVEALS

SEQ ID NO: 6049 - DNA, 2823 bp, Alloiococcus otitidis; identical to SEQ ID NO: 6047
  CDS (139)..(2820)

SEQ ID NO: 6050 - protein, 894 aa, Alloiococcus otitidis
MIETANNYYNEQNLADMQVISPFGYTEEDIDEFSQVRDATVDVHKTVDVLDDENRAFRLFGYSEDHELNDYLVLEGRLPEEPNEIALDSKDDFLQEFDIGDTFSLETDASFDNTANVNEEEFEIVGFVQTPMYVEDETRGTTAIGAGVLEGFGVVTEDAIDLEESNLVHLKFDELSQGRDVYSEDYQNEIDDIQEEYEDVFNDRAEERKQDMINQAQEELDEGRNQIQEAEDQLEEGRQALEEARTQLDQAKEEIGDQESQLQAAAALYGPNSELVLAGQAQLEEAQNQIQEAEEEYESNLAEFEEAEAEAQEELEDARAQLEEGEEELAEFEETNASMFYNTSLDFPGVNEYGENADRIQAISRVFPVFFFALAILISLTTMSRIVNEGRTQIGTMKALGYNNTQISAKYFTYALLATVLGGVIGLPLGFWLFPTVIVNAYEAAYQLIDAQISFYPGIAAIAFVGAVLATSIATFASLRSMLKENAASLLRPKAPKSGQRIFLERISWIWDRLGFIQKVSVRNLFRYKGRLFMTIIGVAGGVALMLTGFGLYDSIQGIGELQFNEISNYDAISVVDTNAEEDQVDEVEDTISDSDLTEDFIRVSTQTMTLQDDQTDQELSLMIPESAEELEDYMELQDYDTDERLALPEDGALVTQKIAELEDISIGDTFILEDYENQEYEVEVAGIVNNYVAHYVYVSPEYWKTVSDEDYDFDTRLIRYDQNAEVTAEAEGEFEDQLVDLDATLAVNLMTENLQTVEDSLSALSTVMVVLILSAAILAFVVLYNVTNINVSERVEELSTIKVLGFFDMEVTRYVYRETFTLSIMGILVGLIFGFFLHQYIIETVELNYIMFSRTILWPSYLYSAGLMVIFSIIVMVIMHFKLKSIDMVEALS

SEQ ID NO: 6051 - DNA, 2823 bp, Alloiococcus otitidis; identical to SEQ ID NO: 6047
  CDS (118)..(2820)

SEQ ID NO: 6052 - protein, 901 aa, Alloiococcus otitidis
MVATSPVMIETANNYYNEQNLADMQVISPFGYTEEDIDEFSQVRDATVDVHKTVDVLDDENRAFRLFGYSEDHELNDYLVLEGRLPEEPNEIALDSKDDFLQEFDIGDTFSLETDASFDNTANVNEEEFEIVGFVQTPMYVEDETRGTTAIGAGVLEGFGVVTEDAIDLEESNLVHLKFDELSQGRDVYSEDYQNEIDDIQEEYEDVFNDRAEERKQDMINQAQEELDEGRNQIQEAEDQLEEGRQALEEARTQLDQAKEEIGDQESQLQAAAALYGPNSELVLAGQAQLEEAQNQIQEAEEEYESNLAEFEEAEAEAQEELEDARAQLEEGEEELAEFEETNASMFYNTSLDFPGVNEYGENADRIQAISRVFPVFFFALAILISLTTMSRIVNEGRTQIGTMKALGYNNTQISAKYFTYALLATVLGGVIGLPLGFWLFPTVIVNAYEAAYQLIDAQISFYPGIAAIAFVGAVLATSIATFASLRSMLKENAASLLRPKAPKSGQRIFLERISWIWDRLGFIQKVSVRNLFRYKGRLFMTIIGVAGGVALMLTGFGLYDSIQGIGELQFNEISNYDAISVVDTNAEEDQVDEVEDTISDSDLTEDFIRVSTQTMTLQDDQTDQELSLMIPESAEELEDYMELQDYDTDERLALPEDGALVTQKIAELEDISIGDTFILEDYENQEYEVEVAGIVNNYVAHYVYVSPEYWKTVSDEDYDFDTRLIRYDQNAEVTAEAEGEFEDQLVDLDATLAVNLMTENLQTVEDSLSALSTVMVVLILSAAILAFVVLYNVTNINVSERVEELSTIKVLGFFDMEVTRYVYRETFTLSIMGILVGLIFGFFLHQYIIETVELNYIMFSRTILWPSYLYSAGLMVIFSIIVMVIMHFKLKSIDMVEALS

SEQ ID NO: 6053 - DNA, 2823 bp, Alloiococcus otitidis; identical to SEQ ID NO: 6047
  CDS (7)..(2820)

SEQ ID NO: 6054 - protein, 938 aa, Alloiococcus otitidis
MFNKALIKDTLREIWNTKSRFISIFAIILIGVAFFSGLVATSPVMIETANNYYNEQNLADMQVISPFGYTEEDIDEFSQVRDATVDVHKTVDVLDDENRAFRLFGYSEDHELNDYLVLEGRLPEEPNEIALDSKDDFLQEFDIGDTFSLETDASFDNTANVNEEEFEIVGFVQTPMYVEDETRGTTAIGAGVLEGFGVVTEDAIDLEESNLVHLKFDELSQGRDVYSEDYQNEIDDIQEEYEDVFNDRAEERKQDMINQAQEELDEGRNQIQEAEDQLEEGRQALEEARTQLDQAKEEIGDQESQLQAAAALYGPNSELVLAGQAQLEEAQNQIQEAEEEYESNLAEFEEAEAEAQEELEDARAQLEEGEEELAEFEETNASMFYNTSLDFPGVNEYGENADRIQAISRVFPVFFFALAILISLTTMSRIVNEGRTQIGTMKALGYNNTQISAKYFTYALLATVLGGVIGLPLGFWLFPTVIVNAYEAAYQLIDAQISFYPGIAAIAFVGAVLATSIATFASLRSMLKENAASLLRPKAPKSGQRIFLERISWIWDRLGFIQKVSVRNLFRYKGRLFMTIIGVAGGVALMLTGFGLYDSIQGIGELQFNEISNYDAISVVDTNAEEDQVDEVEDTISDSDLTEDFIRVSTQTMTLQDDQTDQELSLMIPESAEELEDYMELQDYDTDERLALPEDGALVTQKIAELEDISIGDTFILEDYENQEYEVEVAGIVNNYVAHYVYVSPEYWKTVSDEDYDFDTRLIRYDQNAEVTAEAEGEFEDQLVDLDATLAVNLMTENLQTVEDSLSALSTVMVVLILSAAILAFVVLYNVTNINVSERVEELSTIKVLGFFDMEVTRYVYRETFTLSIMGILVGLIFGFFLHQYIIETVELNYIMFSRTILWPSYLYSAGLMVIFSIIVMVIMHFKLKSIDMVEALS

SEQ ID NO: 6055 - DNA, 714 bp, Alloiococcus otitidis
  CDS (10)..(711)
gtgaaagtgatgacggcctttatttcggtaaaagatgaatataagtattttgactcaggtgacagtaaaattgcagctaatgacggcatgacttttgaaattgaagaaaatgaatatgcagtgatcgtcggacccagtggtgcagggaaaacaaccgtcctcaacattttagggggcatggacacagctgatgagggagatgttattatagatggcaagaacctcattgactacgacgacaagcaactaacccagtacagacgggatgatgtcggttttattttccaatcctacaacttaatccctaacttgaccgctaaggaaaatgttgaattctcttcagaaatttccgatgatgccctggaccccgatgaagttttagaaagtgtcggactctctcacagacgagacaacttcccagcccaattatctggtggggaacagcagcgggtagccattgcccgagccttagctaagaagcctaagctcttactctgtgatgagccgactggtgccttggactttgaaacaggcaagaaagtcttgaaattattggaagaggccaaagaagaatatggggcaacagttgtcgtgatcacccacaaccaggctatcgccaaaatggctgaccgagtaattgaaattgcggatgccaaggtaaccaacactaccgtcaatgacaatccgaaaccggttgatgaaatttcatggtaa

SEQ ID NO: 6056 - protein, 234 aa, Alloiococcus otitidis
MTAFISVKDEYKYFDSGDSKIAANDGMTFEIEENEYAVIVGPSGAGKTTVLNILGGMDTADEGDVIIDGKNLIDYDDKQLTQYRRDDVGFIFQSYNLIPNLTAKENVEFSSEISDDALDPDEVLESVGLSHRRDNFPAQLSGGEQQRVAIARALAKKPKLLLCDEPTGALDFETGKKVLKLLEEAKEEYGATVVVITHNQAIAKMADRVIEIADAKVTNTTVNDNPKPVDEISW

SEQ ID NO: 6057 - DNA, 714 bp, Alloiococcus otitidis; identical to SEQ ID NO: 6055
  CDS (1)..(711)

SEQ ID NO: 6058 - protein, 237 aa, Alloiococcus otitidis
MKVMTAFISVKDEYKYFDSGDSKIAANDGMTFEIEENEYAVIVGPSGAGKTTVLNILGGMDTADEGDVIIDGKNLIDYDDKQLTQYRRDDVGFIFQSYNLIPNLTAKENVEFSSEISDDALDPDEVLESVGLSHRRDNFPAQLSGGEQQRVAIARALAKKPKLLLCDEPTGALDFETGKKVLKLLEEAKEEYGATVVVITHNQAIAKMADRVIEIADAKVTNTTVNDNPKPVDEISW

SEQ ID NO: 6059 - DNA, 495 bp, Alloiococcus otitidis
  CDS (211)..(492)
ttattagctgtttcgatcatgacggggctagttgccaccaagccggagaaaaaggcaaccccgataaggataatggcaaatatggagataaaccggcttttggtattccatatttccctaagagtatctttgattagggctttattaaacacgcatgatcacctttctaccaagtgcttttaccatgaaatttcatcaaccggtttcggattgtcattgacggtagtgttggttaccttggcatccgcaatttcaattactcggtcagccattttggcgatagcctggttgtgggtgatcacgacaactgttgccccatattcttctttggcctcttccaataatttcaagactttcttgcctgtttcaaagtccaaggcaccagtcggctcatcacagagtaagagcttaggcttcttagctaaggctcgggcaatggctacccgctgctgttccccaccagataattgggctgggaagttgtctcgtctgtga

SEQ ID NO: 6060 - protein, 94 aa, Alloiococcus otitidis
MSLTVVLVTLASAISITRSAILAIAWLWVITTTVAPYSSLASSNNFKTFLPVSKSKAPVGSSQSKSLGFLAKARAMATRCCSPPDNWAGKLSRL

SEQ ID NO: 6061 - DNA, 495 bp, Alloiococcus otitidis; identical to SEQ ID NO: 6059
  CDS (19)..(492)

SEQ ID NO: 6062 - protein, 158 aa, Alloiococcus otitidis
MTGLVATKPEKKATPIRIMANMEINRLLVFHISLRVSLIRALLNTHDHLSTKCFYHEISSTGFGLSLTVVLVTLASAISITRSAILAIAWLWVITTTVAPYSSLASSNNFKTFLPVSKSKAPVGSSQSKSLGFLAKARAMATRCCSPPDNWAGKLSRL

SEQ ID NO: 6063 - DNA, 246 bp, Alloiococcus otitidis
  CDS (4)..(243)
tcaatgaggttcttgccatctataataacatctccctcatcagctgtgtccatgccccctaaaatgttgaggacggttgttttccctgcaccactgggtccgacgatcactgcatattcattttcttcaatttcaaaagtcatgccgtcattagctgcaattttactgtcacctgagtcaaaatacttatattcatcttttaccgaaataaaggccgtcatcactttcactcatttctatttctaa

SEQ ID NO: 6064 - protein, 80 aa, Alloiococcus otitidis
MRFLPSIITSPSSAVSMPPKMLRTVVFPAPLGPTITAYSFSSISKVMPSLAAILLSPESKYLYSSFTEIKAVITFTHFYF

SEQ ID NO: 6065 - DNA, 615 bp, Alloiococcus otitidis
  CDS (16)..(612)
cccaaaggaggacttatggaccgccgccaagaaaaaaccaagcaagctattttacaagccttgatcgacctgattgacaaaaagggtctggaccaagtcagtgtcagcgacctgtgtcaacaagccaatattagccggtcaaccttctacctccattacaaaaatatggaggacctcttactcagtgtggaggctgactttatcagggaaatcaccgaggccatccaagacttagagacggaagaccttatctacaacagccaggctttgacccaattgtttacccggattctggaatccatcgaaaaaaatagtgatttgattatcaccctgatgagtccgacaacctcccctaggacccggctgaccatcgaacaagccattgaaaatatcataatcgaccggatgaatacggccatcataagagaggcgacccaagaagagctgccagtgagcaagacctatattgcggtcaccatctcttcccttttcacgggtattgtggcggagtggctgcttagtggcaaaaaagaaagccctcaggacctgggccagtttatctctgaagtagcaacccagcctatgattgaccgtgtccttggattggaccagtaa

SEQ ID NO: 6066 - protein, 199 aa, Alloiococcus otitidis
MDRRQEKTKQAILQALIDLIDKKGLDQVSVSDLCQQANISRSTFYLHYKNMEDLLLSVEADFIREITEAIQDLETEDLIYNSQALTQLFTRILESIEKNSDLIITLMSPTTSPRTRLTIEQAIENIIIDRMNTAIIREATQEELPVSKTYIAVTISSLFTGIVAEWLLSGKKESPQDLGQFISEVATQPMIDRVLGLDQ

SEQ ID NO: 6067 - DNA, 1197 bp, Alloiococcus otitidis
  CDS (646)..(1194)
acggaaagaagagtgattgggatgcaagacgtccacttaaaacgcttagcagccaaccggattaaacacggctacccggttttgactgacttagacttttacgacaaggcgggtgcccaagaaggggatattgtccgcttgttagatccccagaagtcttatgtggcaactggctacctgggttatgaaaaccgcaatagtggctgggtcctctcttgggaggacgagaagattgaccaggactttttccgccagaaattgcaagcagccaaggactaccgtcaagctttttatgccaacagtgacaccaatgccttccgggtctttaatggagatggggacgggattggcggtttgaccattgactattatgcgggctattatgttatctcttggtacaaccagggcctctaccagcttcggtctaagttggttcccttgatcgcttctgtcttccaagacggactgggtttttatgagaaaaataactttcctgatgccccagtgaaaagtcaacacctccagggggaccaagcacctgagcccttgctggtcaaggaaaatggccttacttatgccacttacctgaatgacggctggatgactgggattttccttgaccaaagggacctacgttatgacctgatgacccggtttgggccagggcgacgggttttaaacctcttctcctatacgggagctttctctgtagcagctagcatgggtggggcagtccatactgtgaatgtcgacgtggctaaaagaagtaaaaaattaacagctgagcaatttagcttaaacgccctagaccccgaccaacatgaaatccgggtgattgatgttgactcttacttggactatgcaaaaaaacaccatttgacctttggcctcattgtgatagacccgccaacttttgcccggaccgatgccgggacctggcaggtggaagaagactacagccgggtgatcaaagattgcttgagtattttggaccgggacggcatcctcattgcttctaccaatgcctggcaggttagcaaggatgaattttacaagttgatcgaacgtggctttgaccaggccggatgcgacgggttggtggtggaagagtacggcctgcctcaagactacagggtccgggaaacttttcctgaaagccactacttaaaggtttttgccttacagaaggacgaatag

SEQ ID NO: 6068 - protein, 183 aa, Alloiococcus otitidis
MTRFGPGRRVLNLFSYTGAFSVAASMGGAVHTVNVDVAKRSKKLTAEQFSLNALDPDQHEIRVIDVDSYLDYAKKHHLTFGLIVIDPPTFARTDAGTWQVEEDYSRVIKDCLSILDRDGILIASTNAWQVSKDEFYKLIERGFDQAGCDGLVVEEYGLPQDYRVRETFPESHYLKVFALQKDE

SEQ ID NO: 6069 - DNA, 1197 bp, Alloiococcus otitidis; identical to SEQ ID NO: 6067
  CDS (22)..(1194)

SEQ ID NO: 6070 - protein, 391 aa, Alloiococcus otitidis
MQDVHLKRLAANRIKHGYPVLTDLDFYDKAGAQEGDIVRLLDPQKSYVATGYLGYENRNSGWVLSWEDEKIDQDFFRQKLQAAKDYRQAFYANSDTNAFRVFNGDGDGIGGLTIDYYAGYYVISWYNQGLYQLRSKLVPLIASVFQDGLGFYEKNNFPDAPVKSQHLQGDQAPEPLLVKENGLTYATYLNDGWMTGIFLDQRDLRYDLMTRFGPGRRVLNLFSYTGAFSVAASMGGAVHTVNVDVAKRSKKLTAEQFSLNALDPDQHEIRVIDVDSYLDYAKKHHLTFGLIVIDPPTFARTDAGTWQVEEDYSRVIKDCLSILDRDGILIASTNAWQVSKDEFYKLIERGFDQAGCDGLVVEEYGLPQDYRVRETFPESHYLKVFALQKDE

SEQ ID NO: 6071 - DNA, 1197 bp, Alloiococcus otitidis; identical to SEQ ID NO: 6067
  CDS (13)..(1194)

SEQ ID NO: 6072 - protein, 394 aa, Alloiococcus otitidis
MIGMQDVHLKRLAANRIKHGYPVLTDLDFYDKAGAQEGDIVRLLDPQKSYVATGYLGYENRNSGWVLSWEDEKIDQDFFRQKLQAAKDYRQAFYANSDTNAFRVFNGDGDGIGGLTIDYYAGYYVISWYNQGLYQLRSKLVPLIASVFQDGLGFYEKNNFPDAPVKSQHLQGDQAPEPLLVKENGLTYATYLNDGWMTGIFLDQRDLRYDLMTRFGPGRRVLNLFSYTGAFSVAASMGGAVHTVNVDVAKRSKKLTAEQFSLNALDPDQHEIRVIDVDSYLDYAKKHHLTFGLIVIDPPTFARTDAGTWQVEEDYSRVIKDCLSILDRDGILIASTNAWQVSKDEFYKLIERGFDQAGCDGLVVEEYGLPQDYRVRETFPESHYLKVFALQKDE

SEQ ID NO: 6073 - DNA, 489 bp, Alloiococcus otitidis
  CDS (7)..(486)
gtccctttggtcaaggaaaatcccagtcatccagccgtcattcaggtaagtggcataagtaaggccattttccttgaccagcaagggctcaggtgcttggtccccctggaggtgttgacttttcactggggcatcaggaaagttatttttctcataaaaacccagtccgtcttggaagacagaagcgatcaagggaaccaacttagaccgaagctggtagaggccctggttgtaccaagagataacataatagcccgcataatagtcaatggtcaaaccgccaatcccgtccccatctccattaaagacccggaaggcattggtgtcactgttggcataaaaagcttgacggtagtccttggctgcttgcaatttctggcggaaaaagtcctggtcaatcttctcgtcctcccaagagaggacccagccactattgcggttttcataacccaggtagccagttgccacataagacttctggggatctaa

SEQ ID NO: 6074 - protein, 160 aa, Alloiococcus otitidis
MVKENPSHPAVIQVSGISKAIFLDQQGLRCLVPLEVLTFHWGIRKVIFLIKTQSVLEDRSDQGNQLRPKLVEALVVPRDNIIARIIVNGQTANPVPISIKDPEGIGVTVGIKSLTVVLGCLQFLAEKVLVNLLVLPREDPATIAVFITQVASCHIRLLGI

SEQ ID NO: 6075 - DNA, 996 bp, Alloiococcus otitidis
  CDS (418)..(993)
agggcaggtaggaggcagtcagtgatgatacaaggatttttaagacgattttttcctaggcttaaagaggacaaaaataagaattctcaaagcggagatcttgtgctagagaagggccaggccaagctcaaagtaaccgaaagtgatgacatccacgccttggaagatttcaagagttttattgaacaccggcgggccgccaattccattcctttcccggtcccccaagccttggaccagtggcaggtagaaatcatagacgatggacccatgcggacttttgtttggaatgaccggcaagaccccaaacaaaaggccattttttacctccatggtggatcttactttaaacagcccaaagaccgctattttaagggtctcagtgaatgggctcgggaattaggggctaagattgtcatgcccctttatcctaaagggcctcaatatagctaccgtgcttcccaagaccgcctagtcaagctttacttaaagctcttagagagtctggaagatgccaaacaagtgagcttgattggagacagctcaggtggaggactgagcatgggtctggctgaccgcttagctcagaaaggaatcgaccagcccaaggatattatcctgatttctccatggttggatattgcaaccgacaatcctgatatagccgactaccaaggtctagaccctgacttgagacagtgggtcctccaagagtatgggaaaatttgggctgaaagtccagacaataggaccaatcccatggtcagtcccctatatagtcaagaacttcaccggatgggaaaattaaccattattgtaggggaccaggaaatcttttaccctgacaacctccttctccacgataaactaagccagctagggattgaccacaactttattgtggggcaaggcttacaccacatttttgccatgaaggagaccgaccagggatttggcatgcgccggcaaattgctggtataatagaagaagattag

SEQ ID NO: 6076 - protein, 192 aa, Alloiococcus otitidis
MPLYPKGPQYSYRASQDRLVKLYLKLLESLEDAKQVSLIGDSSGGGLSMGLADRLAQKGIDQPKDIILISPWLDIATDNPDIADYQGLDPDLRQWVLQEYGKIWAESPDNRTNPMVSPLYSQELHRMGKLTIIVGDQEIFYPDNLLLHDKLSQLGIDHNFIVGQGLHHIFAMKETDQGFGMRRQIAGIIEED

SEQ ID NO: 6077 - DNA, 996 bp, Alloiococcus otitidis; identical to SEQ ID NO: 6075
  CDS (25)..(993)

SEQ ID NO: 6078 - protein, 323 aa, Alloiococcus otitidis
MIQGFLRRFFPRLKEDKNKNSQSGDLVLEKGQAKLKVTESDDIHALEDFKSFIEHRRAANSIPFPVPQALDQWQVEIIDDGPMRTFVWNDRQDPKQKAIFYLHGGSYFKQPKDRYFKGLSEWARELGAKIVMPLYPKGPQYSYRASQDRLVKLYLKLLESLEDAKQVSLIGDSSGGGLSMGLADRLAQKGIDQPKDIILISPWLDIATDNPDIADYQGLDPDLRQWVLQEYGKIWAESPDNRTNPMVSPLYSQELHRMGKLTIIVGDQEIFYPDNLLLHDKLSQLGIDHNFIVGQGLHHIFAMKETDQGFGMRRQIAGIIEED

SEQ ID NO: 6079 - DNA, 996 bp, Alloiococcus otitidis; identical to SEQ ID NO: 6075
  CDS (22)..(993)

SEQ ID NO: 6080 - protein, 324 aa, Alloiococcus otitidis
MMIQGFLRRFFPRLKEDKNKNSQSGDLVLEKGQAKLKVTESDDIHALEDFKSFIEHRRAANSIPFPVPQALDQWQVEIIDDGPMRTFVWNDRQDPKQKAIFYLHGGSYFKQPKDRYFKGLSEWARELGAKIVMPLYPKGPQYSYRASQDRLVKLYLKLLESLEDAKQVSLIGDSSGGGLSMGLADRLAQKGIDQPKDIILISPWLDIATDNPDIADYQGLDPDLRQWVLQEYGKIWAESPDNRTNPMVSPLYSQELHRMGKLTIIVGDQEIFYPDNLLLHDKLSQLGIDHNFIVGQGLHHIFAMKETDQGFGMRRQIAGIIEED

SEQ ID NO: 6081 - DNA, 294 bp, Alloiococcus otitidis
  CDS (67)..(291)
ttcccgagcccattcactgagacccttaaaatagcggtctttgggctgtttaaagtaagatccaccatggaggtaaaaaatggccttttgtttggggtcttgccggtcattccaaacaaaagtccgcatgggtccatcgtctatgatttctacctgccactggtccaaggcttgggggaccgggaaaggaatggaattggcggcccgccggtgttcaataaaactcttgaaatcttccaaggcgtggatgtcatcactttcggttactttgagcttggcctggcccttctctag

SEQ ID NO: 6082 - protein, 75 aa, Alloiococcus otitidis
MEVKNGLLFGVLPVIPNKSPHGSIVYDFYLPLVQGLGDRERNGIGGPPVFNKTLEIFQGVDVITFGYFELGLALL

SEQ ID NO: 6083 - DNA, 1308 bp, Alloiococcus otitidis
  CDS (46)..(1305)
actttaggtgaaatgacagaaatgtatcgtaagtctccaaacttaatggagcaagttgttgacagaagaaacttggaaacagcagccaaagccgttaaacggaacaaaggcgctgcaggtattgacggtatgaccgtttttgagatagaggagcacattcaagcgtattatcaacccttacggaagaaattacttgatggaacgtataagcctcaaccagttaaacgagtagaaataccaaagccgaatggagaaaaacgaaagttaggtataccttgtgtgcgggatagagttgttcaacaagccatacggcaagtaattgaaccgattatagacccgcacttctatgacaacagtcacggattccgaccagggaaaagcacgcacagtgctctcaagcaatgtgcacagtattataaagaaggctatcgagttgtagttgattgtgacctcaaacaatgctttgacacgctcaatcacgacaaacttatctattatcttgaacagtacatccaagataaaatgatactgaaaattatccgtaagtttttgagagcgggtgtaattgatttgactagcgaatttatcgcaagtgaaacaggggcaccacaaggtggtgttctatcaccgcttttgagtaatgtgtacttacatgaactggataaagagttggttaaccgtggtcaccgatttgtccgatacgcagatgactttgtcatctacgttaaatcaaaacgagccggtgaacgggtaatgaacagcatcacacgctttattgaaaaagacttaaagttaatcgtcaatcaagacaaaagccaggttgggtctcctacccgtttaaagtttttgagctgtctgatgaagcaagtgaatggggattatcgttttatccctaccaaagaagccaagcagaaattcaaacgcagattgagaaagctgaccagtcgtaaacggccaggtacttttaaaaagataatgactgaaattaatcgagtcacccgcggttggattaattattttggtttaggcttcattaaaagctttatcaaagaagttgagcaatggttaaatcaccgtatcagacagctgattcttaaacggtggaaacgtccacgaactattataccaaagttggaacaatatggactggacttagattcagccaaacggattgcgtattcacgcaaaaagtactggcgactgtcatgcacacatgaatttcatcgtgcaataacaacagaaagactcagcaagtggggcttagttccactaagcactatcgctgagtctgcttacgcaagatattga

SEQ ID NO: 6084 - protein, 420 aa, Alloiococcus otitidis; identical to SEQ ID NO: 312

SEQ ID NO: 6085 - DNA, 1308 bp, Alloiococcus otitidis; identical to SEQ ID NO: 6083
  CDS (13)..(1305)

SEQ ID NO: 6086 - protein, 431 aa, Alloiococcus otitidis; identical to SEQ ID NO: 314

SEQ ID NO: 6087 - DNA, 999 bp, Alloiococcus otitidis
  CDS (22)..(996)
tttttaggaggtaaagtggctatgaacatgaaaaaaattttagcaagtactgccctatcggcgagcatccttggtcttattagcccaagtctagctactggtcgtcaagttgaagcttctggaggtccgatagaagcagcccaaagtcaaaatggagatcctgctgatccttcttctgaccaagcagtgacctaccaggttcaacaaagtgataacctctaccgtattggtcaaaattataatgtcactgtctcgcaattgatgtcttggaatgacttgggtccaaatgatgtgatccaacctggcgacagcttggtcatttaccctggacaagaccaaagtcaagctgatagtcaagcaagtggtcaagattattactatacggttaagccccaacaagggctttggcggattgcccaagaaacaaatacaagtgtagagaagattaaagaatggaataatcttggaccaaacgacaccatccatcctggagaccaattactgattaaagaaggtatcaaggattaccaagagcaggggctggaagatccagattatcttccgactcaccttggcccttatgaagttgaaccaggtgattccctctggagcattgcggccaaatttggcgacagcatggaagagatgatggcccgaaacgggattacagctgataccctcatcaaacccggtgacgtcattatagttgaagcggacgaattaagatggattccagacactaactaccaaagccttaaccccaaagactatacccaagcggccttagaccgaatccacgaagctacagactaccaatataaaccagttgattttgtctatacgactgaagtcattaacggtgaaaccttagaaataaccctttacaaagaccacccagaacggttgacagcggaaaatagattccgttacaataccagaacgggtcaactcttccaacaagatgttgcatctggtccagatgaatgggttgagcaataa

SEQ ID NO: 6088 - protein, 325 aa, Alloiococcus otitidis
MNMKKILASTALSASILGLISPSLATGRQVEASGGPIEAAQSQNGDPADPSSDQAVTYQVQQSDNLYRIGQNYNVTVSQLMSWNDLGPNDVIQPGDSLVIYPGQDQSQADSQASGQDYYYTVKPQQGLWRIAQETNTSVEKIKEWNNLGPNDTIHPGDQLLIKEGIKDYQEQGLEDPDYLPTHLGPYEVEPGDSLWSIAAKFGDSMEEMMARNGITADTLIKPGDVIIVEADELRWIPDTNYQSLNPKDYTQAALDRIHEATDYQYKPVDFVYTTEVINGETLEITLYKDHPERLTAENRFRYNTRTGQLFQQDVASGPDEWVEQ

SEQ ID NO: 6089 - DNA, 999 bp, Alloiococcus otitidis; identical to SEQ ID NO: 6087
  CDS (16)..(996)

SEQ ID NO: 6090 - protein, 327 aa, Alloiococcus otitidis
MAMNMKKILASTALSASILGLISPSLATGRQVEASGGPIEAAQSQNGDPADPSSDQAVTYQVQQSDNLYRIGQNYNVTVSQLMSWNDLGPNDVIQPGDSLVIYPGQDQSQADSQASGQDYYYTVKPQQGLWRIAQETNTSVEKIKEWNNLGPNDTIHPGDQLLIKEGIKDYQEQGLEDPDYLPTHLGPYEVEPGDSLWSIAAKFGDSMEEMMARNGITADTLIKPGDVIIVEADELRWIPDTNYQSLNPKDYTQAALDRIHEATDYQYKPVDFVYTTEVINGETLEITLYKDHPERLTAENRFRYNTRTGQLFQQDVASGPDEWVEQ

SEQ ID NO: 6091 - DNA, 408 bp, Alloiococcus otitidis
  CDS (79)..(405)
ttggtctccaggatggatggtgtcgtttggtccaagattattccattctttaatcttctctacacttgtatttgtttcttgggcaatccgccaaagcccttgttggggcttaaccgtatagtaataatcttgaccacttgcttgactatcagcttgactttggtcttgtccagggtaaatgaccaagctgtcgccaggttggatcacatcatttggacccaagtcattccaagacatcaattgcgagacagtgacattataattttgaccaatacggtagaggttatcactttgttgaacctggtaggtcactgcttggtcagaagaaggatcagcaggatctccattttgactttgggctgcttctatcggacctccagaagcttcaacttgacgaccagtagctag

SEQ ID NO: 6092 - protein, 109 aa, Alloiococcus otitidis
MGNPPKPLLGLNRIVIILTTCLTISLTLVLSRVNDQAVARLDHIIWTQVIPRHQLRDSDIIILTNTVEVITLLNLVGHCLVRRRISRISILTLGCFYRTSRSFNLTTSS

SEQ ID NO: 6093 - DNA, 408 bp, Alloiococcus otitidis; identical to SEQ ID NO: 6091
  CDS (13)..(405)

SEQ ID NO: 6094 - protein, 131 aa, Alloiococcus otitidis
MDGVVWSKIIPFFNLLYTCICFLGNPPKPLLGLNRIVIILTTCLTISLTLVLSRVNDQAVARLDHIIWTQVIPRHQLRDSDIIILTNTVEVITLLNLVGHCLVRRRISRISILTLGCFYRTSRSFNLTTSS

SEQ ID NO: 6095 - DNA, 1545 bp, Alloiococcus otitidis
  CDS (4)..(1542)
ttaatgagaagaagtaaattggtccttagtacgctagctggactttcttctttgcttattttagatagggaagtccatgcagaagaagttgataatttggaaaactctgcttacgttacagctagtgatcaaatagaaagttttactgaagaaaatgaaaacttcgacattattaaagaagatttagaagatccatatgaaggaagtgatccgtcagattttgatcatgatctagttcaagagtatgatgacttacatagtcaaacagaatctagtgatcagggtcacattgactccttggatgagactgctgatgaagaagagcaatcttatgaggatgaaagttcagatctattggaatcatacgatgatttaagtcaaatagaagatggttggacttcccataatcagaacgaagaaattaatggggaggaaaataacgaagattattcaagtgaaactgaagctagtcatgtttttaccgacgaagactaccaaataacggattctctattgtctgccccagtagaaggacaggatagagtcgaacagggtgagcaatcaagagaaggcggacaaacccaagcaagggcttatgatcaagcagttacaagctatgatagcagccaaacgcagcgctctgctcctgaccaaacagttacaacctatcaagctgaagatcaagcaaattaccatcaggaatttattgacgaaattaaaggccctgcgattcaaggttggtatgattatggtgtgctaccatccattacagtggcacaagctattctcgaaagtggttggggtacttctactttagcggtagaatataataatttgtttggtgttaaaggcgattttgaaggtgatagtgctaacttagacacagttgaagaatcagaggaagggcaatatgaagttaatgacgagtttagggcctatcctagttgggaagcaagtatagaagaccatggtagatttttgtatgaaaactctatatatgaaagtttgataggagatactgattatgtcagtgttgctaataaacttcaagaagctggatatgccacagattcttcatatgcttcaaaattaatccaaattattgaagataatcagttatatgaattagaccgtatagtcattcaaggagaaaatccagacactggtggtagtgatcaacctgatcaaacaagcgatgattccaatgtttacactgttcaaccaggtgactccctatcaagtattgcacaacagtttgatatcacaattgatcaattgttatcttggaatggtattacaattgatactgtcatacacccaggggatcaattgattgtaggggaaagtagctccgatactactaatgaacaagaaggggagcaaacagcatctgaagatgcagaaacatatattgttcaaccaggtgactcactctggagtatttcagaacaatttggtgttagtttagatgaattgttagattggaacaatttaactgaagatagtgtaatccaccctggtgacgaaatcattattcgaaactaa

SEQ ID NO: 6096 - protein, 513 aa, Alloiococcus otitidis
MRRSKLVLSTLAGLSSLLILDREVHAEEVDNLENSAYVTASDQIESFTEENENFDIIKEDLEDPYEGSDPSDFDHDLVQEYDDLHSQTESSDQGHIDSLDETADEEEQSYEDESSDLLESYDDLSQIEDGWTSHNQNEEINGEENNEDYSSETEASHVFTDEDYQITDSLLSAPVEGQDRVEQGEQSREGGQTQARAYDQAVTSYDSSQTQRSAPDQTVTTYQAEDQANYHQEFIDEIKGPAIQGWYDYGVLPSITVAQAILESGWGTSTLAVEYNNLFGVKGDFEGDSANLDTVEESEEGQYEVNDEFRAYPSWEASIEDHGRFLYENSIYESLIGDTDYVSVANKLQEAGYATDSSYASKLIQIIEDNQLYELDRIVIQGENPDTGGSDQPDQTSDDSNVYTVQPGDSLSSIAQQFDITIDQLLSWNGITIDTVIHPGDQLIVGESSSDTTNEQEGEQTASEDAETYIVQPGDSLWSISEQFGVSLDELLDWNNLTEDSVIHPGDEIIIRN

SEQ ID NO: 6097 - DNA, 447 bp, Alloiococcus otitidis
  CDS (118)..(444)
aggcgactcaaagcttattggaagctcttcttaaaaaaagaatctgacttatcctatacgtcctatcacttttaccgtctctttggtcaacgaaccgaagcgggtattcttcaggaaatgttggcctatgatccgtccttaaaacggcattaccggctttatcaagacttgatacaggccatccaagaccaagacatggccaagctagaagatcgattaaccgtcaaccaagaaggcttatccaactacatgaaacgcagcctcaaaaccttggccaaacacctcccctttattgagaacaccttccactatccgtataccaacggtaaaattgaaggtattcataataaaatcaaagtcctaaaccgcattgcatatggcttccgaaaccttggcaattacctcgaccggatttgcctttactttagctcccaacccattcaataa

SEQ ID NO: 6098 - protein, 109 aa, Alloiococcus otitidis
MLAYDPSLKRHYRLYQDLIQAIQDQDMAKLEDRLTVNQEGLSNYMKRSLKTLAKHLPFIENTFHYPYTNGKIEGIHNKIKVLNRIAYGFRNLGNYLDRICLYFSSQPIQ

SEQ ID NO: 6099 - DNA, 924 bp, Alloiococcus otitidis
  CDS (388)..(921)
tgttttcgccttttttcttttatgtatagaaaaacaagtgaattccccttacaatatagtcaccacaactcaaagaaaggagaaattcacttgcctcaccaacatgatattcgaaatttaattcagattcaagatgaaaacatttcttttcaggagccgatgactgaagaaagggaagtcaaaggacaagcggccttgattcttcatgcctctttaacctacactccacactgctgtgctaaatgtggggtcgttaaccaaaactatacgatcatcaaaaatggcacgcaggaatccatgatcaccttaccctttcaccccttcaaacccttttatttatgtcttcgtaagcaacgcttttattgccgttcctgtgggaaaacatttatggcttcgacccacttggtcaacgccaattgctttattgccaatccgttgaaagctggggtagcttttgaagcgagccgggcgatttcatacaaagatattgccgaacgattaaatatttcttggtcgtccgtcgcccgatttgcccgtctagcggcgaaagaaagacggaagggccccaaaagcctgcctgcccacctatcctttgatgaatttaaatataagaaggggaaaatggcctttgactatattgatgccgctaccggtcagatcttaggtattgtttccggtcggacccaatataaaatcacccaacactttatcagccagtacagtctaaaggaccggcaacaggtccaaacggtgaccattgacatgaatgctggctatgtttcttgtattcgtgaactcttcccccaagctaagatcatcattgatcgcttccacttagtccaattgatcaatcggtcgtttaaccaaacccggattcaatacatgaaccaactcaaatccaactcttcggatcaaaagaaatag

SEQ ID NO: 6100 - protein, 178 aa, Alloiococcus otitidis
MASTHLVNANCFIANPLKAGVAFEASRAISYKDIAERLNISWSSVARFARLAAKERRKGPKSLPAHLSFDEFKYKKGKMAFDYIDAATGQILGIVSGRTQYKITQHFISQYSLKDRQQVQTVTIDMNAGYVSCIRELFPQAKIIIDRFHLVQLINRSFNQTRIQYMNQLKSNSSDQKK

SEQ ID NO: 6101 - DNA, 924 bp, Alloiococcus otitidis; identical to SEQ ID NO: 6099
  CDS (22)..(921)

SEQ ID NO: 6102 - protein, 300 aa, Alloiococcus otitidis
MYRKTSEFPLQYSHHNSKKGEIHLPHQHDIRNLIQIQDENISFQEPMTEEREVKGQAALILHASLTYTPHCCAKCGVVNQNYTIIKNGTQESMITLPFHPFKPFYLCLRKQRFYCRSCGKTFMASTHLVNANCFIANPLKAGVAFEASRAISYKDIAERLNISWSSVARFARLAAKERRKGPKSLPAHLSFDEFKYKKGKMAFDYIDAATGQILGIVSGRTQYKITQHFISQYSLKDRQQVQTVTIDMNAGYVSCIRELFPQAKIIIDRFHLVQLINRSFNQTRIQYMNQLKSNSSDQKK

SEQ ID NO: 6103 - DNA, 1890 bp, Alloiococcus otitidis
  CDS (13)..(1887)
aggagttttataatggttggaaaaaataactataaaacacgtgctgaaaaagctgctaacaaaaaacaacgattttcacttaaaaaattaagtgttggagttgcatctgttgcagttggttcgactttactattgggtaatgctgaaacagtttcggctgaagataatgaaccaactattgaagaattgcaagaagctctacagactgaaaaagaatcagctattgctgaactacaaggcattggcattaaagatgaatcaatccttggtctcattagagacgcagattctgtagaagaagtaaaaagcttgagaagcgacattattgacgctcgtcaagaacaagtcagtgctcttccagaccaggcaacaacaaacgaagaagtgtatgatgaagctactccatctacatctactgaagaatctactggcgaggaagatgaaaacgactttgatataccagactatgcagaccatggcagtgtcgataataaaacaatagtaggagtaaacgaaaaacaacaagaagaagggcttcgggaagcaaaagcagaagcaattgctgaaattcaagaagctggttacaccgaacaagaatacgctgacgtgatcaatgctcagtcaactgttcgattcgtcgaagatgctaaaaacgaaatcttagcaactgatcctgcagaggaagaagctcaagaagaagtttacaccctctactactacggtcaacgaactcaaaatcaaaacggtgccactactgtagaagcaagtaacgctgaagaagcaaaagagtacttccaaaacttcttgagtgaaaatggcttagacgcaaatgacttcaattggcactacgacgaagaagaccgagtctttaccgcaagtgaaaaaattgaaggcgaaacttcggttgattccgaatacgacttcaatgcaccagacattgactggagcggtttagaagacgcagtagctgaggaagaagctcaagaagaagtttacaccctctactactacggtcagcgaactcaaaaccaaaacggtgctaccactgttaaagcaaccagcccaagagaagctctcgaatacttccaagacttcttgagtgaaaatggtttagatgcaggcgacttcaactggcactatgaaagtgaagaccgagtctttactgcgagcgaaaaaatcgaaggcgaagcttccgttgattctgaatatgacttcttagcacccgagtttgactggagcggtctagaagaagctactaaaaataaaaacgatcaagaagaagtttactccttcgtttatatcactcaaaacaccaaaggtaaaaacggtgccactactgtcaaagcatcaagccttgaagaagctaaagcatacttccaaaactgggctgaagaacatgacctaggcgaccttgaatggtcttacgacgaagaaactaagacattcactgctcatgaaaaaactgaggaaaataccggtattaaaggttcaacaactgttgaatccgtctacgacttcttaccagacagtgagttaacctgggacgagttggtggatgaacttacaaatggatcagatgattctaaaggccaagaacctggccaagatgcaccagttaaacctggtaaaggttctgaaggtcaagtagctactccagttcaagacagcaaacaagctactagtcaaactggttctcaagctacaggccaaggtcaagcacctgcaggtcaggtacaagcttctggtcaagcacaagcttctaaccagcaagctgctgaagaatctgggcaaactctaccagacacagctacttcaacttgggcactaggcctacttggtctatcaagcttagctggtggattgttcgctggtaaaaacaaagaagactaa

SEQ ID NO: 6104 - protein, 625 aa, Alloiococcus otitidis
MVGKNNYKTRAEKAANKKQRFSLKKLSVGVASVAVGSTLLLGNAETVSAEDNEPTIEELQEALQTEKESAIAELQGIGIKDESILGLIRDADSVEEVKSLRSDIIDARQEQVSALPDQATTNEEVYDEATPSTSTEESTGEEDENDFDIPDYADHGSVDNKTIVGVNEKQQEEGLREAKAEAIAEIQEAGYTEQEYADVINAQSTVRFVEDAKNEILATDPAEEEAQEEVYTLYYYGQRTQNQNGATTVEASNAEEAKEYFQNFLSENGLDANDFNWHYDEEDRVFTASEKIEGETSVDSEYDFNAPDIDWSGLEDAVAEEEAQEEVYTLYYYGQRTQNQNGATTVKATSPREALEYFQDFLSENGLDAGDFNWHYESEDRVFTASEKIEGEASVDSEYDFLAPEFDWSGLEEATKNKNDQEEVYSFVYITQNTKGKNGATTVKASSLEEAKAYFQNWAEEHDLGDLEWSYDEETKTFTAHEKTEENTGIKGSTTVESVYDFLPDSELTWDELVDELTNGSDDSKGQEPGQDAPVKPGKGSEGQVATPVQDSKQATSQTGSQATGQGQAPAGQVQASGQAQASNQQAAEESGQTLPDTATSTWALGLLGLSSLAGGLFAGKNKED

SEQ ID NO: 6105 - DNA, 2235 bp, Alloiococcus otitidis
  CDS (601)..(2232)
aagaaggatttgtgtatggagaacttaaaacgaagactgggtcaaccgaccagttttttactagtagcccttgtgaccttttgggctaaaacttacctggcttatttatttgaatttaaccttggtgtgagtggcttgttccagcacctaatcctattgctcaaccctttgccaatcatgctagtcttactcagtttaggtttgtactttaaggacagtaaaaaatccctggtcaccatgtggttgattcatttcctagccagtctcctcctttttgtgaatatcctatattatcgggaatttgctgattttctaaccaccaacgttgcagttggggcagggaccgtctcaaaaggcttggtttcctcaaccttaaatgtcttaacttggcatgacccactttactggctggacagtatactcttagcctacgccttgtataaggtcttcaagtccaaccatgatgagtctaagccaaaccgcaagcggacagccctcataaccaccctagccggtgctggtctgtttggggccaacttaggcctagctgaaattagccgaccccaattgttaacccggacctttgaccgcaattatattgtgaaatatcttggcttgaacttttttaccggctatgatgcagctaaaacggtccaaaacaaccagatcagagccaatgctgatgagtctgacttgagtgaagttgtcaactatgtccaagacaattatgctgaaccagaccctgacatgtttgggaaggcagaaggtagaaatgtgattacggtagttttagagagtgcccagcaattcttggtggactatgaattggaggacgaagaaggcaacttgcatgaagtaacccctttcttaaactccttaatccatgaccaggccacctactccttctccaacttctttgaccaggtcggccaagggaaatcgtcggatgctgaagtgatggcagagaactccttgtttggtttgccccaggggtcggccttccaaagcttgggctccagcaataccttccatgcctcaccagacatcttagaggcagaaaaaggctatacgacggcttccttccacgggaatgtggggtcattctggaaccgaacagacacctaccagtcctttggttttgactttttcttcgatgcagaattttatgatttagatgatgaaaataccctggaatatggtttgaaggacaaggtctttttccatgactcggcccagtatattgaacagctaccccaacccttctatgccaaattcctaacggttaccaaccacttcccttacccgcttgatgaggctaatattgacttccctcaagccaacacaagtgatgagaccatcaaccagtacttccaaaccaaccactacgctgaccaggccttggaagaattcttcaactggttgaaggaatcaggcttgtatgaaaattcaattattgtggtttacggcgaccactatggcatttccgatacccgtaacccggccctaggggaacttttcggtattcctgaagatgagtggaccgcctaccacaatgcccagatgagacggattccaatgctcttccacataccaggagaagaagatggccatgtaattgacaagtatgcgggtcaaattgacctcttgccgactttgcttcacctgctcggcatcgaaaccgaccagtacctctttatgggccaagacgtcttctcaccagaccacaatgagtcggttaccatgcgcaatggacgatttatcaatgaagactacaccattgtcaacggtgatatctacgacagccaaagcggggccttgttaaatgaccagttgagcgaccaagagaaagaagaaatcttccagatgcgggaccaggccaaccagcgtttagagcactccgacaacatcatgatgaaagacttgctacgcttctacacacctgaatccttggcaggcagagaggcaaatgactatatctactatgaccaaatgcctgtcttagaaaaccatcctgacaaagataccagcctagccaatcaatcagaccaggatgacttgcctgacctttatgaaacggatgcccctgaaattaccggacaacccattatcagcgaatttaacgaatatggccaagaagccatggacgaagaaatcgacgaccaggcaattgatgggcagtacaaggatgaagaagaggaagaaggcgtccaggaagactttatcgatggcgaataa

SEQ ID NO: 6106 - protein, 544 aa, Alloiococcus otitidis
MKYLGLNFFTGYDAAKTVQNNQIRANADESDLSEVVNYVQDNYAEPDPDMFGKAEGRNVITVVLESAQQFLVDYELEDEEGNLHEVTPFLNSLIHDQATYSFSNFFDQVGQGKSSDAEVMAENSLFGLPQGSAFQSLGSSNTFHASPDILEAEKGYTTASFHGNVGSFWNRTDTYQSFGFDFFFDAEFYDLDDENTLEYGLKDKVFFHDSAQYIEQLPQPFYAKFLTVTNHFPYPLDEANIDFPQANTSDETINQYFQTNHYADQALEEFFNWLKESGLYENSIIVVYGDHYGISDTRNPALGELFGIPEDEWTAYHNAQMRRIPMLFHIPGEEDGHVIDKYAGQIDLLPTLLHLLGIETDQYLFMGQDVFSPDHNESVTMRNGRFINEDYTIVNGDIYDSQSGALLNDQLSDQEKEEIFQMRDQANQRLEHSDNIMMKDLLRFYTPESLAGREANDYIYYDQMPVLENHPDKDTSLANQSDQDDLPDLYETDAPEITGQPIISEFNEYGQEAMDEEIDDQAIDGQYKDEEEEEGVQEDFIDGE

SEQ ID NO: 6107 - DNA, 2235 bp, Alloiococcus otitidis; identical to SEQ ID NO: 6105
  CDS (436)..(2232)

SEQ ID NO: 6108 - protein, 599 aa, Alloiococcus otitidis
MYKVFKSNHDESKPNRKRTALITTLAGAGLFGANLGLAEISRPQLLTRTFDRNYIVKYLGLNFFTGYDAAKTVQNNQIRANADESDLSEVVNYVQDNYAEPDPDMFGKAEGRNVITVVLESAQQFLVDYELEDEEGNLHEVTPFLNSLIHDQATYSFSNFFDQVGQGKSSDAEVMAENSLFGLPQGSAFQSLGSSNTFHASPDILEAEKGYTTASFHGNVGSFWNRTDTYQSFGFDFFFDAEFYDLDDENTLEYGLKDKVFFHDSAQYIEQLPQPFYAKFLTVTNHFPYPLDEANIDFPQANTSDETINQYFQTNHYADQALEEFFNWLKESGLYENSIIVVYGDHYGISDTRNPALGELFGIPEDEWTAYHNAQMRRIPMLFHIPGEEDGHVIDKYAGQIDLLPTLLHLLGIETDQYLFMGQDVFSPDHNESVTMRNGRFINEDYTIVNGDIYDSQSGALLNDQLSDQEKEEIFQMRDQANQRLEHSDNIMMKDLLRFYTPESLAGREANDYIYYDQMPVLENHPDKDTSLANQSDQDDLPDLYETDAPEITGQPIISEFNEYGQEAMDEEIDDQAIDGQYKDEEEEEGVQEDFIDGE

SEQ ID NO: 6109 - DNA, 2235 bp, Alloiococcus otitidis; identical to SEQ ID NO: 6105
  CDS (16)..(2232)

SEQ ID NO: 6110 - protein, 739 aa, Alloiococcus otitidis
MENLKRRLGQPTSFLLVALVTFWAKTYLAYLFEFNLGVSGLFQHLILLLNPLPIMLVLLSLGLYFKDSKKSLVTMWLIHFLASLLLFVNILYYREFADFLTTNVAVGAGTVSKGLVSSTLNVLTWHDPLYWLDSILLAYALYKVFKSNHDESKPNRKRTALITTLAGAGLFGANLGLAEISRPQLLTRTFDRNYIVKYLGLNFFTGYDAAKTVQNNQIRANADESDLSEVVNYVQDNYAEPDPDMFGKAEGRNVITVVLESAQQFLVDYELEDEEGNLHEVTPFLNSLIHDQATYSFSNFFDQVGQGKSSDAEVMAENSLFGLPQGSAFQSLGSSNTFHASPDILEAEKGYTTASFHGNVGSFWNRTDTYQSFGFDFFFDAEFYDLDDENTLEYGLKDKVFFHDSAQYIEQLPQPFYAKFLTVTNHFPYPLDEANIDFPQANTSDETINQYFQTNHYADQALEEFFNWLKESGLYENSIIVVYGDHYGISDTRNPALGELFGIPEDEWTAYHNAQMRRIPMLFHIPGEEDGHVIDKYAGQIDLLPTLLHLLGIETDQYLFMGQDVFSPDHNESVTMRNGRFINEDYTIVNGDIYDSQSGALLNDQLSDQEKEEIFQMRDQANQRLEHSDNIMMKDLLRFYTPESLAGREANDYIYYDQMPVLENHPDKDTSLANQSDQDDLPDLYETDAPEITGQPIISEFNEYGQEAMDEEIDDQAIDGQYKDEEEEEGVQEDFIDGE

SEQ ID NO: 6111 - DNA, 2235 bp, Alloiococcus otitidis; identical to SEQ ID NO: 6105
  CDS (10)..(2232)

SEQ ID NO: 6112 - protein, 741 aa, Alloiococcus otitidis
MCMENLKRRLGQPTSFLLVALVTFWAKTYLAYLFEFNLGVSGLFQHLILLLNPLPIMLVLLSLGLYFKDSKKSLVTMWLIHFLASLLLFVNILYYREFADFLTTNVAVGAGTVSKGLVSSTLNVLTWHDPLYWLDSILLAYALYKVFKSNHDESKPNRKRTALITTLAGAGLFGANLGLAEISRPQLLTRTFDRNYIVKYLGLNFFTGYDAAKTVQNNQIRANADESDLSEVVNYVQDNYAEPDPDMFGKAEGRNVITVVLESAQQFLVDYELEDEEGNLHEVTPFLNSLIHDQATYSFSNFFDQVGQGKSSDAEVMAENSLFGLPQGSAFQSLGSSNTFHASPDILEAEKGYTTASFHGNVGSFWNRTDTYQSFGFDFFFDAEFYDLDDENTLEYGLKDKVFFHDSAQYIEQLPQPFYAKFLTVTNHFPYPLDEANIDFPQANTSDETINQYFQTNHYADQALEEFFNWLKESGLYENSIIVVYGDHYGISDTRNPALGELFGIPEDEWTAYHNAQMRRIPMLFHIPGEEDGHVIDKYAGQIDLLPTLLHLLGIETDQYLFMGQDVFSPDHNESVTMRNGRFINEDYTIVNGDIYDSQSGALLNDQLSDQEKEEIFQMRDQANQRLEHSDNIMMKDLLRFYTPESLAGREANDYIYYDQMPVLENHPDKDTSLANQSDQDDLPDLYETDAPEITGQPIISEFNEYGQEAMDEEIDDQAIDGQYKDEEEEEGVQEDFIDGE

SEQ ID NO: 6113 - DNA, 297 bp, Alloiococcus otitidis
  CDS (7)..(294)
gtaaatatggaagaaatttcgagtaaagactttatgctgcgatacaaaaaagacccccaaatgaagatcttagatgtccggactgagccggaatataaagaaggccatatccctggggctatttcacagcctttagaccaaatagatacttgcagtcttgacaagtctgctgactattatgtcatctgccggagcggacggcggtctagcctggcctgccaacagctccaaagtcaaggctaccaggtaaaaaatgtccaaggcgggatgctagattggtctggcccaaccacttaa

SEQ ID NO: 6114 - protein, 96 aa, Alloiococcus otitidis
MEEISSKDFMLRYKKDPQMKILDVRTEPEYKEGHIPGAISQPLDQIDTCSLDKSADYYVICRSGRRSSLACQQLQSQGYQVKNVQGGMLDWSGPTT

SEQ ID NO: 6115 - DNA, 1464 bp, Alloiococcus otitidis
  CDS (34)..(1461)
ctagccatgaagctaccctatttttaccagcaaatgctgggctttctggttgtcatcctggtcttaatgtatacttctctcctatccttctttcacttaacccgggagtcagcctatgattccacccaggaagacctttttatctatgctgaagaagtggttagctctatctccaagtacaatgactttagccgggagcaggaattgctggaccggtttaatgtttccttggtggtagtagatgaccaaggtcagattatctacccaaaacaaagctcccaggtcttagaccggattattccggaagagatcgatgacttaaaaaatggggaaagagtaacctccctggttgatttggcgactgaccaagaagaggatgaagaatacatgatggcctatgttccttattttatccaggagagtggggaatatgctggttttgtaacggtcatggctcctttttccatagtagatgatgagatatcagctttggaaagtcagtttttcacctcctttttcatcgccacagtggtgtccatcatactctcagctctcctatcttggtaccaggttaaccggatcaaccggctccgcaaggcgaccaaacaggtaacccagggcgagtacgatgttcggattaaccactcggatcgggatgaactcgataatttaagccgagatttcaataagatgattttagccctggaccagtctcagaaggaagtaagccggcaagaagaacgacggaagtcctttatgcaggatgctgctcatgaaatgcggactcccttaacgactattaatggtcttttggaagggttggagtacggtgtgattgatgagtctaaccggcttcgttccatccagctcatgcggaaggaaacgacccgactgattcgcttagtcaacgagaacctggattatgaaaatatccggtccaaccgtttccaacttgataagaaagaaatccccctaagtgatatatttgaagaaatcaactatcaaatgaccacgttagctcaagatgcagacaatgatttagacattcaggatatgggcgagatgacggtcatggctgatggtgaccggctcaagcaaatcctggtcaacttgatcaaaaatgccatccagtttaccgaccacggtaaaattagggtgtgggcggaaaaaggtcattacgggactaagatctatgttcaagacactggaattggaatgacccaagaagaaattcaaaatatctgggagcgctattacaaggcagacacctctcggcaaaacaccacttatggggaatccggcttaggcctatctatcgttcaacaattggtggccctacatggggctaagattgatgttcgcagtaaaaaagataagggaaccacatttagcattgaattcccagatagccctgaacaagaagaagaactccgtcaacataaaccaagagatattattgaataa

SEQ ID NO: 6116 - protein, 476 aa, Alloiococcus otitidis
MLGFLVVILVLMYTSLLSFFHLTRESAYDSTQEDLFIYAEEVVSSISKYNDFSREQELLDRFNVSLVVVDDQGQIIYPKQSSQVLDRIIPEEIDDLKNGERVTSLVDLATDQEEDEEYMMAYVPYFIQESGEYAGFVTVMAPFSIVDDEISALESQFFTSFFIATVVSIILSALLSWYQVNRINRLRKATKQVTQGEYDVRINHSDRDELDNLSRDFNKMILALDQSQKEVSRQEERRKSFMQDAAHEMRTPLTTINGLLEGLEYGVIDESNRLRSIQLMRKETTRLIRLVNENLDYENIRSNRFQLDKKEIPLSDIFEEINYQMTTLAQDADNDLDIQDMGEMTVMADGDRLKQILVNLIKNAIQFTDHGKIRVWAEKGHYGTKIYVQDTGIGMTQEEIQNIWERYYKADTSRQNTTYGESGLGLSIVQQLVALHGAKIDVRSKKDKGTTFSIEFPDSPEQEEELRQHKPRDIIE

SEQ ID NO: 6117 - DNA, 1464 bp, Alloiococcus otitidis; identical to SEQ ID NO: 6115
  CDS (7)..(1461)

SEQ ID NO: 6118 - protein, 485 aa, Alloiococcus otitidis
MKLPYFYQQMLGFLVVILVLMYTSLLSFFHLTRESAYDSTQEDLFIYAEEVVSSISKYNDFSREQELLDRFNVSLVVVDDQGQIIYPKQSSQVLDRIIPEEIDDLKNGERVTSLVDLATDQEEDEEYMMAYVPYFIQESGEYAGFVTVMAPFSIVDDEISALESQFFTSFFIATVVSIILSALLSWYQVNRINRLRKATKQVTQGEYDVRINHSDRDELDNLSRDFNKMILALDQSQKEVSRQEERRKSFMQDAAHEMRTPLTTINGLLEGLEYGVIDESNRLRSIQLMRKETTRLIRLVNENLDYENIRSNRFQLDKKEIPLSDIFEEINYQMTTLAQDADNDLDIQDMGEMTVMADGDRLKQILVNLIKNAIQFTDHGKIRVWAEKGHYGTKIYVQDTGIGMTQEEIQNIWERYYKADTSRQNTTYGESGLGLSIVQQLVALHGAKIDVRSKKDKGTTFSIEFPDSPEQEEELRQHKPRDIIE

SEQ ID NO: 6119 - DNA, 717 bp, Alloiococcus otitidis
  CDS (28)..(714)
gtgagggtgaaaactatgaagatattaatggtagaagataatagttcagtcagtgaaatgctggagatgtttttcctaaaagaagactggcaggctacctttattgaagacggccaagaaggattggatacctatttaaaccaacccaaagactttgacgtgatcgttttagacattatgctaccgagtttggatgggaccagtatttgcaaggaaatccgcaaggtggatgaacaggttcccatcattatgctgacagctaaaaatacggaaagtgatgaagtgatcggcttggagttaggggcagacgactatgtaaccaaaccctttagccccttaacattggtggcccggatcaagtccatttaccgccgggctagccggacagccagcgaccaagaaaacttagaagttgaaacagaccacttgaagatggactcttcaacccgggaagtgaccctctacgggcaaaagttggataacttgaccccgaaagagtacgacttgctccacaccttagcaagtaagccccggcaagtcttttctagggagcaattattgcagcaggtatgggaatatgaatactttggggatgagcggaccgttgatgcccatatcaaaaaattgcggcaaaaattggttgaaaaaggtccccaagtcatccacactgtttggggcgtaggttataaatttgacgatactaaggatagtgactag

SEQ ID NO: 6120 - protein, 229 aa, Alloiococcus otitidis
MVEDNSSVSEMLEMFFLKEDWQATFIEDGQEGLDTYLNQPKDFDVIVLDIMLPSLDGTSICKEIRKVDEQVPIIMLTAKNTESDEVIGLELGADDYVTKPFSPLTLVARIKSIYRRASRTASDQENLEVETDHLKMDSSTREVTLYGQKLDNLTPKEYDLLHTLASKPRQVFSREQLLQQVWEYEYFGDERTVDAHIKKLRQKLVEKGPQVIHTVWGVGYKFDDTKDSD

SEQ ID NO: 6121 - DNA, 717 bp, Alloiococcus otitidis; identical to SEQ ID NO: 6119
  CDS (16)..(714)

SEQ ID NO: 6122 - protein, 233 aa, Alloiococcus otitidis
MKILMVEDNSSVSEMLEMFFLKEDWQATFIEDGQEGLDTYLNQPKDFDVIVLDIMLPSLDGTSICKEIRKVDEQVPIIMLTAKNTESDEVIGLELGADDYVTKPFSPLTLVARIKSIYRRASRTASDQENLEVETDHLKMDSSTREVTLYGQKLDNLTPKEYDLLHTLASKPRQVFSREQLLQQVWEYEYFGDERTVDAHIKKLRQKLVEKGPQVIHTVWGVGYKFDDTKDSD

SEQ ID NO: 6123 - DNA, 717 bp, Alloiococcus otitidis; identical to SEQ ID NO: 6119
  CDS (1)..(714)

SEQ ID NO: 6124 - protein, 238 aa, Alloiococcus otitidis
MRVKTMKILMVEDNSSVSEMLEMFFLKEDWQATFIEDGQEGLDTYLNQPKDFDVIVLDIMLPSLDGTSICKEIRKVDEQVPIIMLTAKNTESDEVIGLELGADDYVTKPFSPLTLVARIKSIYRRASRTASDQENLEVETDHLKMDSSTREVTLYGQKLDNLTPKEYDLLHTLASKPRQVFSREQLLQQVWEYEYFGDERTVDAHIKKLRQKLVEKGPQVIHTVWGVGYKFDDTKDSD

SEQ ID NO: 6125 - DNA, 375 bp, Alloiococcus otitidis
  CDS (16)..(372)
aaaattgagaggaaaatggaaatgaatcgatgtatattaattggacggattgttcgggacctaagtttgcataatttggaaagcggcagtcgggttatcaacaatgttttggctatcaaccgattgaccaagtcttcaggcaagcagacggctgacttcatcccttttgtggcctgggggaggaaggctgaattactggaccagtattgcaagaaaggggatcaagttgccctagaaggtcggctccagtcccggtcttacgagaccaaagacaaggaagtcaggtatgtcgttgagttaaatgtcgacaatattcagtttttacaaaacaaaaaagaagaagtggacctgctcaaagaactggctaagaaatag

SEQ ID NO: 6126 - protein, 119 aa, Alloiococcus otitidis
MEMNRCILIGRIVRDLSLHNLESGSRVINNVLAINRLTKSSGKQTADFIPFVAWGRKAELLDQYCKKGDQVALEGRLQSRSYETKDKEVRYVVELNVDNIQFLQNKKEEVDLLKELAKK

SEQ ID NO: 6127 - DNA, 192 bp, Alloiococcus otitidis
  CDS (1)..(189)
atggatttcattgaaattattcaggatatactctattttttattgaaggtcttaattgtcgttctcgtgattgccattaccttcttagtaggggccatgttaggctatagtttaataggggatgggggcaacccactggatgttttgaaccctcaagtctggcagcaaatttttgcttattttgtcagctag

SEQ ID NO: 6128 - protein, 63 aa, Alloiococcus otitidis
MDFIEIIQDILYFLLKVLIVVLVIAITFLVGAMLGYSLIGDGGNPLDVLNPQVWQQIFAYFVS

SEQ ID NO: 6129 - DNA, 1314 bp, Alloiococcus otitidis
  CDS (4)..(1311)
agtatggacacaatcgtcattcaaggaggagacaatcgacttgagggtacagtcaaggtagaaggggctaagaatgctgcccttcctatcctggctgccagtcttttaccagaagatgggaaaagtcacctgtccaatgtccccttactatctgatatttacacgatgcaagaagttttgcgttacttaaacgttgacattgacttcgatgaagaccacaacgaaatcgtcatagatgctacaggagacctgaattccaataccccttatgaatttatgagcaagatgcgggcttccatcattgtcatgggtcccttactagcccgtaatggttatgccaaagtcgctcttcctggtggttgcgcgattgggactcgtcctattgacttgcacttaaaaggcttccgggctatgggggtcgatgtggaagtcgaaggaggttatgtgatcgccacagttcaagatgaactggatggcgctgatatttaccttgacttcccaagtgttggagctacacaaaatattttgatggctgccacccgggcaaaagggacaacagtcatcgagaatgcagctcgagaacctgaaattgttgaccttgccaactatttgaacaagatgggtgcccgtatttacggggccggaaccaataccatgagaattgaaggggtagacaagctagaagcttgtgaccactccattattgccgaccggatagaaagtggcacctttatggtagcagctggtgtcacccaagggaatgtcttgattgaagactgtatcgtcgaacacaaccgccccttaatttccaagttaagtgaaatgggcgttcaatttgaggaagaaaaaaccggccttcgagtcatgggaccagagaccttacaggcaacagatgttaaaaccctgccttatcctggcttcccaactgatatgcagtcaccgatgacagtcgcccaaaccctagctgagggaagaagcatcatgagagaaacggtcttcgaaaaccgcttcatgcacatggaagagcttcgtaaaatggatgcacaatttactgtcgatggccagtcccttattatcgaggggggcaaaaaactccaaggtgctagagtccagtccagtgacttgcgggcttcagcttccttgattattgctggtttagtagctgatggtgtcaccaaagtaaccaatcttaaccacttagaccggggctactataaatttcacgaaaaattacagcaattaggtgcttccattgaacgaatcgacgaggaaattcaagttgaccaggaagccagcctcaaaaaaggcgaataa

SEQ ID NO: 6130 - protein, 436 aa, Alloiococcus otitidis
MDTIVIQGGDNRLEGTVKVEGAKNAALPILAASLLPEDGKSHLSNVPLLSDIYTMQEVLRYLNVDIDFDEDHNEIVIDATGDLNSNTPYEFMSKMRASIIVMGPLLARNGYAKVALPGGCAIGTRPIDLHLKGFRAMGVDVEVEGGYVIATVQDELDGADIYLDFPSVGATQNILMAATRAKGTTVIENAAREPEIVDLANYLNKMGARIYGAGTNTMRIEGVDKLEACDHSIIADRIESGTFMVAAGVTQGNVLIEDCIVEHNRPLISKLSEMGVQFEEEKTGLRVMGPETLQATDVKTLPYPGFPTDMQSPMTVAQTLAEGRSIMRETVFENRFMHMEELRKMDAQFTVDGQSLIIEGGKKLQGARVQSSDLRASASLIIAGLVADGVTKVTNLNHLDRGYYKFHEKLQQLGASIERIDEEIQVDQEASLKKGE

SEQ ID NO: 6131 - DNA, 264 bp, Alloiococcus otitidis
  CDS (34)..(261)
gctaggaaaggaattttagagaggagtcttagcatggtttatgtcgatggacaggctgtgattgccattatttcccatttgatatttattgtcttaaccttttgggccatgcagtcactgctaactagtggctggatcaaaaaacaccacattccccaagcccgtttactctttatgcttatttccatcgctattggctataatgtcagtctttttgtcttggaaatcattttcacagcccagtcaatcggagccttgttttag

SEQ ID NO: 6132 - protein, 76 aa, Alloiococcus otitidis
MVYVDGQAVIAIISHLIFIVLTFWAMQSLLTSGWIKKHHIPQARLLFMLISIAIGYNVSLFVLEIIFTAQSIGALF

SEQ ID NO: 6133 - DNA, 645 bp, Alloiococcus otitidis
  CDS (16)..(642)
aaaaggagcttagcaatggcaaatgttcatatcttagaccaccccctcatccagcataaactcaccattattcgcgacaaggaaaccggaacaaagacctttagagaagttgtcaacgaaattgcccgtttgatggcttatgaggtttccagacagatgccccttgaagatattgaaattgaaaccccacttgccaagaccacccaaaaacgcttagcgggtaagaaagtggtcatcgtccctattttaagagctggccttgggatggtagacggaatgctagacttgattcctgctgccaaggtaggccacatgggggtttaccgggatgaagaaagcaaaaaaccggtggaatacttctgtaagatgccccaagacattgccagcagacagctcctggttgtcgatccgatgttggcaacagggggatcagctattgctaccatcgaggccttgaaaagtcggggcggtaaggatatcaagttagtggtcttggtcgctgcaccggaaggcattaaagaattacaggccgaacacccagaggttgacatttttacagctgctgtggatgacaaattaaatgacaatgcttacattgagcctggtttaggcgatgcaggcgaccgtttatttggtacattataa

SEQ ID NO: 6134 - protein, 209 aa, Alloiococcus otitidis
MANVHILDHPLIQHKLTIIRDKETGTKTFREVVNEIARLMAYEVSRQMPLEDIEIETPLAKTTQKRLAGKKVVIVPILRAGLGMVDGMLDLIPAAKVGHMGVYRDEESKKPVEYFCKMPQDIASRQLLVVDPMLATGGSAIATIEALKSRGGKDIKLVVLVAAPEGIKELQAEHPEVDIFTAAVDDKLNDNAYIEPGLGDAGDRLFGTL

SEQ ID NO: 6135 - DNA, 270 bp, Alloiococcus otitidis
  CDS (4)..(267)
gcattgtcatttaatttgtcatccacagcagctgtaaaaatgtcaacctctgggtgttcggcctgtaattctttaatgccttccggtgcagcgaccaagaccactaacttgatatccttaccgccccgacttttcaaggcctcgatggtagcaatagctgatccccctgttgccaacatcggatcgacaaccaggagctgtctgctggcaatgtcttggggcatcttacagaagtattccaccggttttttgctttcttcatcccggtaa

SEQ ID NO: 6136 - protein, 88 aa, Alloiococcus otitidis
MSFNLSSTAAVKMSTSGCSACNSLMPSGAATKTTNLISLPPRLFKASMVAIADPPVANIGSTTRSCLLAMSWGILQKYSTGFLLSSSR

SEQ ID NO: 6137 - DNA, 1005 bp, Alloiococcus otitidis
  CDS (358)..(1002)
aaaagtgtggaaagtttgtggataaagcctgaagaattggacaaggcagtgaccctactgaaagagggcgagctagtggccttccctacagaaactgtctatggcctgggagcagatgctaaaaacgaccaggctgtccaaaaaatttaccaggcaaaaggacgtcccagtgacaacccccttattgtccatatctactctgtagaccaggtctatgactttagctcaaggatacccagtcggacccaggacttggttgatgcctattggccggggcccttaaccattatcttaaaccatgaccaagagacggcagcgcccacggtaacggctggccaggattctattgggatccggatgcctagccatcctcttgctagggatttactcaaggcgtccggcttagccttggctgccccttcagctaacctgtcgggccggcccagcccaacctcagctgaccatgtttggcatgacttgtctggtcggatcgccggggtccttgatgggggaccaactggcctaggtttggagtcgacggtggttgactttaccagtccagaccagcctgccatcttacgaccaggtggcctggctcgagaagatattgagcgggttattggacctgtccaagacaagacccagtccaagtcaggtgacaaaggacctaaagcgccaggtatgaagtaccgccactattcccctgaccagcctgtctacattgtggacaagaattggacagaggcgatcgataagtgcttgaaatctggcgaaaaaattggtattctagctagcgatgatattattgaaaattacggtgaccaagtttacgatgtcttttccttaggaggccctaaggatgtggcccgggcttgtcaagttctctacaagggcttgcggtattttgatgactctcctgttacccttatcctagcccagtcttatgccaaaagtggacttggttgggcctatatgaatcgactggaaaaagcagctagtcaataa

SEQ ID NO: 6138 - protein, 215 aa, Alloiococcus otitidis
MPSHPLARDLLKASGLALAAPSANLSGRPSPTSADHVWHDLSGRIAGVLDGGPTGLGLESTVVDFTSPDQPAILRPGGLAREDIERVIGPVQDKTQSKSGDKGPKAPGMKYRHYSPDQPVYIVDKNWTEAIDKCLKSGEKIGILASDDIIENYGDQVYDVFSLGGPKDVARACQVLYKGLRYFDDSPVTLILAQSYAKSGLGWAYMNRLEKAASQ

SEQ ID NO: 6139 - DNA, 1005 bp, Alloiococcus otitidis; identical to SEQ ID NO: 6137
  CDS (16)..(1002)

SEQ ID NO: 6140 - protein, 329 aa, Alloiococcus otitidis
MWIKPEELDKAVTLLKEGELVAFPTETVYGLGADAKNDQAVQKIYQAKGRPSDNPLIVHIYSVDQVYDFSSRIPSRTQDLVDAYWPGPLTIILNHDQETAAPTVTAGQDSIGIRMPSHPLARDLLKASGLALAAPSANLSGRPSPTSADHVWHDLSGRIAGVLDGGPTGLGLESTVVDFTSPDQPAILRPGGLAREDIERVIGPVQDKTQSKSGDKGPKAPGMKYRHYSPDQPVYIVDKNWTEAIDKCLKSGEKIGILASDDIIENYGDQVYDVFSLGGPKDVARACQVLYKGLRYFDDSPVTLILAQSYAKSGLGWAYMNRLEKAASQ

SEQ ID NO: 6141 - DNA, 1005 bp, Alloiococcus otitidis; identical to SEQ ID NO: 6137
  CDS (7)..(1002)

SEQ ID NO: 6142 - protein, 332 aa, Alloiococcus otitidis
MESLWIKPEELDKAVTLLKEGELVAFPTETVYGLGADAKNDQAVQKIYQAKGRPSDNPLIVHIYSVDQVYDFSSRIPSRTQDLVDAYWPGPLTIILNHDQETAAPTVTAGQDSIGIRMPSHPLARDLLKASGLALAAPSANLSGRPSPTSADHVWHDLSGRIAGVLDGGPTGLGLESTVVDFTSPDQPAILRPGGLAREDIERVIGPVQDKTQSKSGDKGPKAPGMKYRHYSPDQPVYIVDKNWTEAIDKCLKSGEKIGILASDDIIENYGDQVYDVFSLGGPKDVARACQVLYKGLRYFDDSPVTLILAQSYAKSGLGWAYMNRLEKAASQ

SEQ ID NO: 6143 - DNA, 858 bp, Alloiococcus otitidis
  CDS (160)..(855)
gcaatgaaggggtctaatatgccaagctattcagaagtcctccaatgggcttcttcttttttggccgaccggggtgtagacccccatgtggccaagtggttgatgagggaagggctagaccttagcccaactgacttgctagtcaaggcgaaagaccccatgccagcaggagaccggcaagactataccaagcaggtcaagctggccagcccccactaccctgcccagtatatcgtaggccatgagtggtttgacggtcacaagtttaaagtgaatccgtctgccttaatccccaggccagaaacagaagcctggtttgccagctatatcgacaagttatctcctaaacccctcaagctggtggatgtagggaccgggacaggagtcatcggcatctcccataagcttagacgcccccaagaccaagtttacttgaccgatattttagaccaaaccctagacctggcccgggataatgcccaacgattaggagcagaggtgcagtttgttcaaggggactttttaacccccttgctcgaccaggacattcattttgaccttatcgtgtccaatcccccctatattgccaaagaagagtgggatgaaatggacgaatcggtccggaagtacgaacccaaattagctctttttgcggaccaggatggcctggctgcttaccagaaaatcttgtcccagtccaaattacttgtagcagacaagtttatgattttgctagaagtaggctataagcagggccaggcggtttctcacctggcccaggaaacttatccacaggcccgtgtaaaaacttggacagatttagccggcttggaccgcttagtgtcagttgttgtctaa

SEQ ID NO: 6144 - protein, 232 aa, Alloiococcus otitidis
MPAGDRQDYTKQVKLASPHYPAQYIVGHEWFDGHKFKVNPSALIPRPETEAWFASYIDKLSPKPLKLVDVGTGTGVIGISHKLRRPQDQVYLTDILDQTLDLARDNAQRLGAEVQFVQGDFLTPLLDQDIHFDLIVSNPPYIAKEEWDEMDESVRKYEPKLALFADQDGLAAYQKILSQSKLLVADKFMILLEVGYKQGQAVSHLAQETYPQARVKTWTDLAGLDRLVSVVV

SEQ ID NO: 6145 - DNA, 858 bp, Alloiococcus otitidis; identical to SEQ ID NO: 6143
  CDS (4)..(855)

SEQ ID NO: 6146 - protein, 284 aa, Alloiococcus otitidis
MKGSNMPSYSEVLQWASSFLADRGVDPHVAKWLMREGLDLSPTDLLVKAKDPMPAGDRQDYTKQVKLASPHYPAQYIVGHEWFDGHKFKVNPSALIPRPETEAWFASYIDKLSPKPLKLVDVGTGTGVIGISHKLRRPQDQVYLTDILDQTLDLARDNAQRLGAEVQFVQGDFLTPLLDQDIHFDLIVSNPPYIAKEEWDEMDESVRKYEPKLALFADQDGLAAYQKILSQSKLLVADKFMILLEVGYKQGQAVSHLAQETYPQARVKTWTDLAGLDRLVSVVV

SEQ ID NO: 6147 - DNA, 1179 bp, Alloiococcus otitidis
  CDS (79)..(1176)
gcggcaatgaatcttattacccggtttgccgccagcactactttaacccgccattggacagtgaagggaagattatcaatgagtgaccagacgagtatatttgaccgactggaagcagtcgatgcgagatatgaagaattaaatgaactcttaagtgacccccaagtcattaatgataccgaccgctttatgaagttgagcaaggaagaagcagatttaagagaaaccgttcaagtttacggccggtataaagaggtcaaagagggaatccaagagacagaggacatgctatctgatagcgacttagacaaagaaatggcagaccttgccaaggaagagctagcagacttgaagtcagagcaggatgaactggaagacaagctaaccctcctcctcttacccaaggatgaaaacgatgaacgcaatatcatcatggaaatcagaggggctgctggtggggatgaagcccaactatttgccggcgacttgtttgaaatgtaccgcaagtatgccgaaaaccaaggctggacggtcgaagtcctagactctaacacaagtggagtagggggctttaaagaaattattttctccattgacggcaacaatgtctactctaaattgaagtttgaaaatggggcccaccgggttcaacgagttcctgagactgaatcccagggccggatccacacctcaaccgcaactgttgtcgtcatgccggaagcagaagatgtggaaattgacattgatcccaatgatattcggacagatatctaccacgcttctggagctggtggccagcacgtcaacaagaccgcttctgcagtccgcttgacccatgagcccactggaatcgtagtggccatgcaggacgagcggtcccaactaaaaaaccgggagaaagccatgaaggtcttgcggtctagggtatatgacaagattcagtctgagcaacaagctgaatttgacgctgaacggaagtcagctgttggaactggcgaccggtctgaacggatccggacctataacttcccccaaagccgggtgactgaccaccggatcaacttaaccctgcaaaaattagaccaaattttagatggcgacctcggtcaaattattgatgaactaatcgtatgggaacagaccgagaaattggagcagttaagcaatgaaggggtctaa

SEQ ID NO: 6148 - protein, 366 aa, Alloiococcus otitidis
MSDQTSIFDRLEAVDARYEELNELLSDPQVINDTDRFMKLSKEEADLRETVQVYGRYKEVKEGIQETEDMLSDSDLDKEMADLAKEELADLKSEQDELEDKLTLLLLPKDENDERNIIMEIRGAAGGDEAQLFAGDLFEMYRKYAENQGWTVEVLDSNTSGVGGFKEIIFSIDGNNVYSKLKFENGAHRVQRVPETESQGRIHTSTATVVVMPEAEDVEIDIDPNDIRTDIYHASGAGGQHVNKTASAVRLTHEPTGIVVAMQDERSQLKNREKAMKVLRSRVYDKIQSEQQAEFDAERKSAVGTGDRSERIRTYNFPQSRVTDHRINLTLQKLDQILDGDLGQIIDELIVWEQTEKLEQLSNEGV

SEQ ID NO: 6149 - DNA, 1179 bp, Alloiococcus otitidis; identical to SEQ ID NO: 6147
  CDS (61)..(1176)

SEQ ID NO: 6150 - protein, 372 aa, Alloiococcus otitidis
MKGRLSMSDQTSIFDRLEAVDARYEELNELLSDPQVINDTDRFMKLSKEEADLRETVQVYGRYKEVKEGIQETEDMLSDSDLDKEMADLAKEELADLKSEQDELEDKLTLLLLPKDENDERNIIMEIRGAAGGDEAQLFAGDLFEMYRKYAENQGWTVEVLDSNTSGVGGFKEIIFSIDGNNVYSKLKFENGAHRVQRVPETESQGRIHTSTATVVVMPEAEDVEIDIDPNDIRTDIYHASGAGGQHVNKTASAVRLTHEPTGIVVAMQDERSQLKNREKAMKVLRSRVYDKIQSEQQAEFDAERKSAVGTGDRSERIRTYNFPQSRVTDHRINLTLQKLDQILDGDLGQIIDELIVWEQTEKLEQLSNEGV

SEQ ID NO: 6151 - DNA, 1179 bp, Alloiococcus otitidis; identical to SEQ ID NO: 6147
  CDS (7)..(1176)

SEQ ID NO: 6152 - protein, 390 aa, Alloiococcus otitidis
MNLITRFAASTTLTRHWTVKGRLSMSDQTSIFDRLEAVDARYEELNELLSDPQVINDTDRFMKLSKEEADLRETVQVYGRYKEVKEGIQETEDMLSDSDLDKEMADLAKEELADLKSEQDELEDKLTLLLLPKDENDERNIIMEIRGAAGGDEAQLFAGDLFEMYRKYAENQGWTVEVLDSNTSGVGGFKEIIFSIDGNNVYSKLKFENGAHRVQRVPETESQGRIHTSTATVVVMPEAEDVEIDIDPNDIRTDIYHASGAGGQHVNKTASAVRLTHEPTGIVVAMQDERSQLKNREKAMKVLRSRVYDKIQSEQQAEFDAERKSAVGTGDRSERIRTYNFPQSRVTDHRINLTLQKLDQILDGDLGQIIDELIVWEQTEKLEQLSNEGV

SEQ ID NO: 6153 - DNA, 633 bp, Alloiococcus otitidis
  CDS (67)..(630)
tttataaggacttttaagaaagtaggagtgaggtttatggcacaactttactaccggtatggggctatgaattcgggtaagtcaatcgagattctaaaagtagcctacaattatgaagaacaaaataaaaaagtggccctctttacctcgggcatggatgaccgggaagagattgggaaaattgcctctcgtattgggatgaaccgagatgccacggtcattaaccacgacaccaatatctttgaggcagtgaaaaatatcgaagataaaatttcttgtgttttgattgatgaggcgcaatttttgaccaaggaacatgtttaccaactagcccagatctgcgacgatttggacattcctgttatggcttttggcctgaaaaatgattttcgcaatgaattgtttgaggggtccaagtatctcttgcttttggctgagaagattgaagagatgaagaccatttgttggttctgtggtaaaaaggccaccatgaatatgcggattgctgaaggcaaaccagtccgacaaggagaccagattcaaataggcggcaatgaatcttattacccggtttgccgccagcactactttaacccgccattggacagtgaagggaagattatcaatgagtga

SEQ ID NO: 6154 - protein, 188 aa, Alloiococcus otitidis
MNSGKSIEILKVAYNYEEQNKKVALFTSGMDDREEIGKIASRIGMNRDATVINHDTNIFEAVKNIEDKISCVLIDEAQFLTKEHVYQLAQICDDLDIPVMAFGLKNDFRNELFEGSKYLLLLAEKIEEMKTICWFCGKKATMNMRIAEGKPVRQGDQIQIGGNESYYPVCRQHYFNPPLDSEGKIINE

SEQ ID NO: 6155 - DNA, 633 bp, Alloiococcus otitidis; identical to SEQ ID NO: 6153
  CDS (37)..(630)

SEQ ID NO: 6156 - protein, 198 aa, Alloiococcus otitidis
MAQLYYRYGAMNSGKSIEILKVAYNYEEQNKKVALFTSGMDDREEIGKIASRIGMNRDATVINHDTNIFEAVKNIEDKISCVLIDEAQFLTKEHVYQLAQICDDLDIPVMAFGLKNDFRNELFEGSKYLLLLAEKIEEMKTICWFCGKKATMNMRIAEGKPVRQGDQIQIGGNESYYPVCRQHYFNPPLDSEGKIINE

SEQ ID NO: 6157 - DNA, 633 bp, Alloiococcus otitidis; identical to SEQ ID NO: 6153
  CDS (28)..(630)

SEQ ID NO: 6158 - protein, 201 aa, Alloiococcus otitidis
MRFMAQLYYRYGAMNSGKSIEILKVAYNYEEQNKKVALFTSGMDDREEIGKIASRIGMNRDATVINHDTNIFEAVKNIEDKISCVLIDEAQFLTKEHVYQLAQICDDLDIPVMAFGLKNDFRNELFEGSKYLLLLAEKIEEMKTICWFCGKKATMNMRIAEGKPVRQGDQIQIGGNESYYPVCRQHYFNPPLDSEGKIINE

SEQ ID NO: 6159 - DNA, 450 bp, Alloiococcus otitidis
  CDS (28)..(447)
acggtttctcttaaatctgcttcttccttgctcaacttcataaagcggtcggtatcattaatgacttgggggtcacttaagagttcatttaattcttcatatctcgcatcgactgcttccagtcggtcaaatatactcgtctggtcactcattgataatcttcccttcactgtccaatggcgggttaaagtagtgctggcggcaaaccgggtaataagattcattgccgcctatttgaatctggtctccttgtcggactggtttgccttcagcaatccgcatattcatggtggcctttttaccacagaaccaacaaatggtcttcatctcttcaatcttctcagccaaaagcaagagatacttggacccctcaaacaattcattgcgaaaatcatttttcaggccaaaagccataacaggaatgtccaaatcgtcgcagatctgggctag

SEQ ID NO: 6160 - protein, 140 aa, Alloiococcus otitidis
MLNFIKRSVSLMTWGSLKSSFNSSYLASTASSRSNILVWSLIDNLPFTVQWRVKVVLAANRVIRFIAAYLNLVSLSDWFAFSNPHIHGGLFTTEPTNGLHLFNLLSQKQEILGPLKQFIAKIIFQAKSHNRNVQIVADLG

SEQ ID NO: 6161 - DNA, 1581 bp, Alloiococcus otitidis
  CDS (991)..(1578)
accatacctagcgcttgttctactataaaggatgagtgttcgaaaaaaggaaataatgaaaggggtatcagcatggaatccaatcctggctttggctttaccaacatggtcgttttagtcgtttatttattgtttatgttagttttcggtagttctttcatcagaaaatcaggcaaaagttcagatgccttttttaaagctgaagggagcttacctgggtgggcagttggaatgagtatttttgctactgcagtcagctcaattacctttatgtctacgccagaacagactttcattagtgattggtcttatattgtgggatctgcttgtataatagtcgtcataccaattttgattgcctactttgtaccatttttcagaaagctccaagtaacctctgcttacgagtacttagaagagcgatttgacccagtcgttcggaccttatccagtgttttgtttgttttataccaccttggtagaatttcagtagttgtttatttgccagttttggcagttgcatcagtgactgatattaatcccgttttgattgctgttgcagttagtttagtttgtattatttataccttgttaggtggtatggaaggagtaatttggagtgacaccatccagggctttattttacttgctggttcaattctaattttattgatggctatttttaaaattgatggaggtctaagcgaaatatcaaataccatagtgtcagaagggaaattcttttcagctagtaacttagacatgagtgatttatcggattatgttccgctaatttttatagggcaacttgtttccttcctttaccaatatggttgttctcaagatatggtacaacgttttgtcacttcaaaatcaatgaaagaaactaaaaaatcactctggctaacttacggtctctgcattgtctttttcccaattttttatgctattggcagtgtcttatatgtttattatggccaaaatggcggtttgccagctggagttaacactagtgctgtcgttccattctttatcttaactgaacttcctgctggtatagctgggctaattattgcagcaatttttgcagcttcccaatcaactgtctccagtagcttgaactcgatctcagcctgcttggtcgttgatatcaaacgacggttctttgaggataaactaaaaaatgtatcagaagtttcaatagctagatggattattatagtcactggtttatttggcttgttagttacagtatactttacagctggtaactcctctcaaacctgggacatcattttagctattggaggactctttggtgtgccaattgctgctgtctttacattaggcatatttacgaagagagcaaatggcaaagggaccctcatcggtttaattgccggaatcgttttagcaataataacggatgccatgaatatttcacccttgctcactgcaactgttgccttcattgtcactttcttaattggttatttcctatctttggcttttcctggtagcgataaaaatattagagggttgacttacaaaacgagagatattacttacgctagaaactaa

SEQ ID NO: 6162 - protein, 196 aa, Alloiococcus otitidis
MPAGVNTSAVVPFFILTELPAGIAGLIIAAIFAASQSTVSSSLNSISACLVVDIKRRFFEDKLKNVSEVSIARWIIIVTGLFGLLVTVYFTAGNSSQTWDIILAIGGLFGVPIAAVFTLGIFTKRANGKGTLIGLIAGIVLAIITDAMNISPLLTATVAFIVTFLIGYFLSLAFPGSDKNIRGLTYKTRDITYARN

SEQ ID NO: 6163 - DNA, 1581 bp, Alloiococcus otitidis; identical to SEQ ID NO: 6161
  CDS (847)..(1578)

SEQ ID NO: 6164 - protein, 244 aa, Alloiococcus otitidis
MVQRFVTSKSMKETKKSLWLTYGLCIVFFPIFYAIGSVLYVYYGQNGGLPAGVNTSAVVPFFILTELPAGIAGLIIAAIFAASQSTVSSSLNSISACLVVDIKRRFFEDKLKNVSEVSIARWIIIVTGLFGLLVTVYFTAGNSSQTWDIILAIGGLFGVPIAAVFTLGIFTKRANGKGTLIGLIAGIVLAIITDAMNISPLLTATVAFIVTFLIGYFLSLAFPGSDKNIRGLTYKTRDITYARN

SEQ ID NO: 6165 - DNA, 1581 bp, Alloiococcus otitidis; identical to SEQ ID NO: 6161
  CDS (73)..(1578)

SEQ ID NO: 6166 - protein, 502 aa, Alloiococcus otitidis
MESNPGFGFTNMVVLVVYLLFMLVFGSSFIRKSGKSSDAFFKAEGSLPGWAVGMSIFATAVSSITFMSTPEQTFISDWSYIVGSACIIVVIPILIAYFVPFFRKLQVTSAYEYLEERFDPVVRTLSSVLFVLYHLGRISVVVYLPVLAVASVTDINPVLIAVAVSLVCIIYTLLGGMEGVIWSDTIQGFILLAGSILILLMAIFKIDGGLSEISNTIVSEGKFFSASNLDMSDLSDYVPLIFIGQLVSFLYQYGCSQDMVQRFVTSKSMKETKKSLWLTYGLCIVFFPIFYAIGSVLYVYYGQNGGLPAGVNTSAVVPFFILTELPAGIAGLIIAAIFAASQSTVSSSLNSISACLVVDIKRRFFEDKLKNVSEVSIARWIIIVTGLFGLLVTVYFTAGNSSQTWDIILAIGGLFGVPIAAVFTLGIFTKRANGKGTLIGLIAGIVLAIITDAMNISPLLTATVAFIVTFLIGYFLSLAFPGSDKNIRGLTYKTRDITYARN

SEQ ID NO: 6167 - DNA, 1626 bp, Alloiococcus otitidis
  CDS (190)..(1623)
aatgaaaagttgggagtttttcaattgaaacactttaagcatcatataattacttcactggtcttgtcttttttgatatgcgcactttccttacccaataatcataagagtatcaaagcagaagagctaggcactgctagtcctgcagatattgaagaaacaagttcggccggagacctgaagaaaaatatggaagaaacaaagatattttttgctggtgatgaaacagcagctaattactttagaattcctaatatttatacgttaaatgatggtcgaatcttggcaagtgcagacgcccggtacggaggcacacatgattcaccgaacaatatcgccattgccagttcttacagtgatgataacgggatgaattggtctgaatcaatattacccttgtcttttgatgattacgccaatcaagaaatagattggcctcgtgatgaccaagggaaagaagaacaaattaaatacagtgcctcttttatcgattcagcaattctagaagattctcaaactggtaatatatatttatttgctgatgttatgccagctggcgttgggaatagcaatgcttggaaaaatgattccggttttgaagaaattgacggtcaatatttcctaaaattacgctcgcaagatgaagaggaatatcattatttgctagggccagaccagataatttatgatcaaaggacaggtgaagaaactgattatagcgttgatgatgactataacatcctaaaaaacggagaatcattgtatacagaacaatattcggttgactttcaagatggtcagctcattgagtatcaaaatggaaccaaagttaaaatgaacattttctattatgactctttatttaaagtagtccctacaaactatgtgggctataccgtcagtcaggatcaaggggaaagttggtcacctttgaacttacttgatcccttgttgggcccagaccataatgcgccatacttgtcccccggcggcggtttagagacctcaaatggacgcttgctagtgtcttcttatactgaatcagccattatatatattgtaagcgatgatcacggtgaaacatggttcccagtaagacaagacttgccattttctgaagcaactgctgaatcgcaaacaattgaacttgaagaagatgttttagcaacctttacaagaactgataatggtaaaattggttacagcatgagtcatgacaatggggacacttggaccgaaatcaccaatcttgatattgtagacaatacacaatatgggacacaggtttcagcattaaaatattcggaagaaattgaaggcaagctagcagttattcttagtacccccaattctacccaagctagggaaaatggcgagttgattatcggtctttataatggtgaagaaatcgaatggaaatatcgttgtactattccggatacacaagatggcttttcttattctgatttaaccgagactcccgatggggaaatagccttgcattatgaaaattatgattcttggtctagagaccagctgcatttgaaagatgtcttactcatgcaaagatttgatagtcaagacataataaatcaatctcaagtgataactgaggatgcaggttag

SEQ ID NO: 6168 - protein, 478 aa, Alloiococcus otitidis
MEETKIFFAGDETAANYFRIPNIYTLNDGRILASADARYGGTHDSPNNIAIASSYSDDNGMNWSESILPLSFDDYANQEIDWPRDDQGKEEQIKYSASFIDSAILEDSQTGNIYLFADVMPAGVGNSNAWKNDSGFEEIDGQYFLKLRSQDEEEYHYLLGPDQIIYDQRTGEETDYSVDDDYNILKNGESLYTEQYSVDFQDGQLIEYQNGTKVKMNIFYYDSLFKVVPTNYVGYTVSQDQGESWSPLNLLDPLLGPDHNAPYLSPGGGLETSNGRLLVSSYTESAIIYIVSDDHGETWFPVRQDLPFSEATAESQTIELEEDVLATFTRTDNGKIGYSMSHDNGDTWTEITNLDIVDNTQYGTQVSALKYSEEIEGKLAVILSTPNSTQARENGELIIGLYNGEEIEWKYRCTIPDTQDGFSYSDLTETPDGEIALHYENYDSWSRDQLHLKDVLLMQRFDSQDIINQSQVITEDAG

SEQ ID NO: 6169 - DNA, 1626 bp, Alloiococcus otitidis; identical to SEQ ID NO: 6167
  CDS (10)..(1623)

SEQ ID NO: 6170 - protein, 538 aa, Alloiococcus otitidis
MGVFQLKHFKHHIITSLVLSFLICALSLPNNHKSIKAEELGTASPADIEETSSAGDLKKNMEETKIFFAGDETAANYFRIPNIYTLNDGRILASADARYGGTHDSPNNIAIASSYSDDNGMNWSESILPLSFDDYANQEIDWPRDDQGKEEQIKYSASFIDSAILEDSQTGNIYLFADVMPAGVGNSNAWKNDSGFEEIDGQYFLKLRSQDEEEYHYLLGPDQIIYDQRTGEETDYSVDDDYNILKNGESLYTEQYSVDFQDGQLIEYQNGTKVKMNIFYYDSLFKVVPTNYVGYTVSQDQGESWSPLNLLDPLLGPDHNAPYLSPGGGLETSNGRLLVSSYTESAIIYIVSDDHGETWFPVRQDLPFSEATAESQTIELEEDVLATFTRTDNGKIGYSMSHDNGDTWTEITNLDIVDNTQYGTQVSALKYSEEIEGKLAVILSTPNSTQARENGELIIGLYNGEEIEWKYRCTIPDTQDGFSYSDLTETPDGEIALHYENYDSWSRDQLHLKDVLLMQRFDSQDIINQSQVITEDAG

SEQ ID NO: 6171 - DNA, 1113 bp, Alloiococcus otitidis
  CDS (1)..(1110)
atggatcaaaaagtgattaattatggcgttgtcgggactggttattttggtactgaattagcaaaagctatccaggctctggctggagctaaaattaaagcggtatatgatccaaataatggcagaaaaatagctagcgaactaagatgtgaatttgaaagttccttagacgaacttgttaaaagaggggacattgactgtatgattgttgcaacccccaacaatctacataaagagcctgtcttaaaagctgcagaagcaggtataaatgttttttgtgaaaaaccaattgccttaaattatcaggactgccatgaaatggtccaagcttgcaagaatgcaggcgtaacttttatggccggtcatattatgaatttctttgatggagtccgccaagctaaacagtatatccaagatggaaaaattggggatgtattatttgtgaaggcagctcgtaatggatgggaagaggcgcaagagagtgtttcttggaaaaaaatccgcagtaagtctggcggtcacctctatcaccacatccatgaattagattgtgtccagtttattatgggtggtttgccaagtcatgtcgctatgtctgcatctgacattgcccataagggtgaagagttcggtgacgaagatgatttcattagtatgaatttggaatttcccaataataaatatgctcacttggaatggggctcggcatttagatggggcgaacactatgttttgatccaaggaacgaagggtgccattatgctagatatgtatgattgtgggggtactttaagagtggacggtcaagatgaccatttccttattcatggctcacaagaaattgatgatgaccgaactcgtatttaccatgggactgaaatggatggtgccatccagtatggtcatccaggtaaacaggctccattatggttaaatgactgtatcaaaaaagaagttacgtttttaaatgatgtactccatggtatggaagttcctgatgaataccgaaaactcctagatggttctgctgcagaagaggctattgctacagcagatgccgccactctagcaaaccaggaaaaacgagtggttaaattaaacgaaattttatag

SEQ ID NO: 6172 - protein, 370 aa, Alloiococcus otitidis
MDQKVINYGVVGTGYFGTELAKAIQALAGAKIKAVYDPNNGRKIASELRCEFESSLDELVKRGDIDCMIVATPNNLHKEPVLKAAEAGINVFCEKPIALNYQDCHEMVQACKNAGVTFMAGHIMNFFDGVRQAKQYIQDGKIGDVLFVKAARNGWEEAQESVSWKKIRSKSGGHLYHHIHELDCVQFIMGGLPSHVAMSASDIAHKGEEFGDEDDFISMNLEFPNNKYAHLEWGSAFRWGEHYVLIQGTKGAIMLDMYDCGGTLRVDGQDDHFLIHGSQEIDDDRTRIYHGTEMDGAIQYGHPGKQAPLWLNDCIKKEVTFLNDVLHGMEVPDEYRKLLDGSAAEEAIATADAATLANQEKRVVKLNEIL

SEQ ID NO: 6173 - DNA, 561 bp, Alloiococcus otitidis
  CDS (103)..(558)
ccgatgagttggactaagcgttaccagctagccaagcatatttgccaaaatgatcctgcagcccggggcgtctggtcaaccttcttcctctatcctggcgtagtggcttacagtcgccactttaaggcccactatttttaccaaaagggttttaaaaactttgcccgctatttgtccgagcgaactaagaagaaaaccaatatcgaaatccaccctggtgcccagttaggggctaatgtttttatcgaccacggcaccggggtagttatcggtgaaacagcgattgtaggtgaccgggtcaagctctatcacggggtcaccttgggcggaaccggtaaagagaaaggagctaagcgccatccaaccattgaaaatgatgtggaaattggggctggtgccattattctaggcgatgtcaccattggccaccacagcaaggttggagccggcgcctatgttaaccgggatgtcccggcttatgcaacggcagttgggatcccagcccggattattttacacgataaagattggaaccgaattggagaaatttctccaagctag

SEQ ID NO: 6174 - protein, 152 aa, Alloiococcus otitidis
MAYSRHFKAHYFYQKGFKNFARYLSERTKKKTNIEIHPGAQLGANVFIDHGTGVVIGETAIVGDRVKLYHGVTLGGTGKEKGAKRHPTIENDVEIGAGAIILGDVTIGHHSKVGAGAYVNRDVPAYATAVGIPARIILHDKDWNRIGEISPS

SEQ ID NO: 6175 - DNA, 561 bp, Alloiococcus otitidis; identical to SEQ ID NO: 6173
  CDS (4)..(558)

SEQ ID NO: 6176 - protein, 185 aa, Alloiococcus otitidis
MSWTKRYQLAKHICQNDPAARGVWSTFFLYPGVVAYSRHFKAHYFYQKGFKNFARYLSERTKKKTNIEIHPGAQLGANVFIDHGTGVVIGETAIVGDRVKLYHGVTLGGTGKEKGAKRHPTIENDVEIGAGAIILGDVTIGHHSKVGAGAYVNRDVPAYATAVGIPARIILHDKDWNRIGEISPS

SEQ ID NO: 6177 - DNA, 942 bp, Alloiococcus otitidis
  CDS (16)..(939)
aaggagattgagctcatgttatacaataatgtcattgatgcgattgggaatacgccggttgttaaactccaccatgttccagaagactctgctgatgtttacgttaagttggaataccaaaacccaggcggcagtgtcaaagaccggcctgttcgctatattatcaaagacttgctgagatcaggcgacttaaaaccgggtggcaccattgttgagtatacaagtgggaataccggcattgccttggctatggtaggggctgctttaggtttaaatgtgattatcaccatgccggagaccatgtccaaagagcgtaaactcctgatgaaagcttatggcgctaacttggttcaaacgccaggggaccaaggtgttgctggagcaagagacaaggctgaagaaattgctaaggaaaaaggagcccctatctttggccagttttctaaccaagccaatgttaagtcccaccaagaaaccactgcccaagaaattttgcaagacatcccggacctagacggctttgtagctggtgttggaactggtggcaccatcactggtgttggtcgtgtcttaaaagaaaaagatgacaagatcaaggtctgggcagttgaaccagcagcttcacctctcttgtcaggcggggaagctggtccccacaagatccagggattaggggctaatttcattcctgaaatcttagaccaagacatctatgacaaggtctaccaggtttccaatgaggatgctatggctaaagcccgggaagtagcccagtcagaaggcctcttggttgggatctcttcaggtgccaacttgcttggagctcttgacttggccaaagaacttggcaaaggccaaaaagttctgactgttctaccatccaatggggaacgctacttgactactgccttgtacgagcacttagccgatgagttggactaa

SEQ ID NO: 6178 - protein, 308 aa, Alloiococcus otitidis
MLYNNVIDAIGNTPVVKLHHVPEDSADVYVKLEYQNPGGSVKDRPVRYIIKDLLRSGDLKPGGTIVEYTSGNTGIALAMVGAALGLNVIITMPETMSKERKLLMKAYGANLVQTPGDQGVAGARDKAEEIAKEKGAPIFGQFSNQANVKSHQETTAQEILQDIPDLDGFVAGVGTGGTITGVGRVLKEKDDKIKVWAVEPAASPLLSGGEAGPHKIQGLGANFIPEILDQDIYDKVYQVSNEDAMAKAREVAQSEGLLVGISSGANLLGALDLAKELGKGQKVLTVLPSNGERYLTTALYEHLADELD

SEQ ID NO: 6179 - DNA, 486 bp, Alloiococcus otitidis
  CDS (79)..(483)
atagctagccttattcttgtgggcctaggggtcggtcgttatactagaggcaaagaagaaaaggaaaggataataaagatgacttatttataccaaaccaaggcagtcaacgaagatggggtagacggctacagttatatcgaaggtgaagaccccataaaggtagcccaccccttgtccgaagaccaaggcttcaatcccgaaaaatttgtcgggctggccttgagtacctgttttaattcgaccgttcaaaaaatcttggaagaagatggactggacaacaagacccgagtcaaagttgcggttcaaatgcatgaggaagaggatgaaactggtttttactttagcttagatgcagaactggccattgaccaaatggacttaagacaggtccaagagtacttggagcgaaccaaggtccgctgccccatggctaaacttctcaaggggtctgcaacagtatcctatgctgtgacaacttactaa

SEQ ID NO: 6180 - protein, 135 aa, Alloiococcus otitidis
MTYLYQTKAVNEDGVDGYSYIEGEDPIKVAHPLSEDQGFNPEKFVGLALSTCFNSTVQKILEEDGLDNKTRVKVAVQMHEEEDETGFYFSLDAELAIDQMDLRQVQEYLERTKVRCPMAKLLKGSATVSYAVTTY

SEQ ID NO: 6181 - DNA, 486 bp, Alloiococcus otitidis; identical to SEQ ID NO: 6179
  CDS (19)..(483)

SEQ ID NO: 6182 - protein, 155 aa, Alloiococcus otitidis
MGLGVGRYTRGKEEKERIIKMTYLYQTKAVNEDGVDGYSYIEGEDPIKVAHPLSEDQGFNPEKFVGLALSTCFNSTVQKILEEDGLDNKTRVKVAVQMHEEEDETGFYFSLDAELAIDQMDLRQVQEYLERTKVRCPMAKLLKGSATVSYAVTTY

SEQ ID NO: 6183 - DNA, 1929 bp, Alloiococcus otitidis
  CDS (583)..(1926)
ggacctcaaagaatcgaattcagtctaccaagaaattatccagtcacaaatgagaggggaggaagtttaatggccagacaagcccacagaaaacgccacgctgatgacttttgggggacagtatggcgcttagtccagtatatgtctcgccggaagggaatcttcatctttgctgtcatcttcgggctggcagccattattctcaatgccattgctccctctgtcatggctatggccaccaatgaagtcatccgggcctttcaagaggcagtgagcgacaacctgtccttgaccaacctgcctatcaattatgacctaattatccaaatcattatagccatcgttattatttacctcagccaagcacttttgcgctacttagaaagttttttactcgctgctttatctcaggcgaccgtttatgacttgcgtgagcacctaaaagaaaaaatcgaaaccctgcccattaagttctttgatacccacgggaatggggacattatgtcccgggccgtcaacgacatggaccaaatcgctaacaccctccaacaatctttaatccaattggttaatggggtcatcatgtttgtgaccgtcctagtgatcatgtttatggtcaactggatgctagccttggttgttttactaaccttcccaatcagtgcaggctgtatttattttattgcaccaagggcccagaagcagtttgcccgccagcaaaaagagttagggattttgacagaccaggtggaagaagtctatgccggtcacactattgttaagacctacaaccgagaagaagatgaaaatgcccgctttgtcgaccaaagtgccaagttaaatgatgcctccaccaaggcccagttcctgtccattattatgatgcccctggtcagttttgctagggacctgggttactttgggatcggtgtctttggtggctggggtgttattaacgggaccatttccatcggccacgtccaagcctttatgcagtatgttaaccaattctcccagcctgtccgctttattgcccaactatccaacaccatccaggtgaccattgcttcaactgagcggatttttgaaatcattgacgaagaacctatgcaaaaagtggaagtcgatgtcccagacaagcaagatactccctacaaggtggaattcgaacacgttcagtttggctatgcagatgatccagaggccgacctcttaatgaatgactttaacttgcaggtgaaaccaggtgaaatggtggccatcgttgggccaaccggggccgggaagtcgaccttgatcaaccttttggaacgcttttacgatgttagaggcgggagtatttacctagacggggtggatacccgccactttaaccggtcggacctgcgcaaacacatgtccatggtccttcaggatacctggctgtttaatggtacgatttgggagaacattgcatacggtaatgacaagtatgccaatgatgatgaaaaaatcctccaggctgctaaaacggccaatgtagacgactttgtccgccgcctacccaagggctactccactgtgattaacgaggaaagttccaacgtttcccaaggccagcgccaattgatcaccattgcccgggccttcttggcagatcctgagatcttaatcctagacgaggctacctcttcggtggacacccggacggaaaaacaaatccaagaagccatggaaaatattatccaagagcgcacctcctttgttattgcccaccgcttgtctactattcaggatgctgacaagatcattgtgatgaaccacggcgatgttatcgaaacaggcacccaccaagaactcctagaccagggaggcttttacgctgatctttactatgcccagtttgcttcttcagatgaccaagcaggagaccttgcctgggatagctag

SEQ ID NO: 6184 - protein, 448 aa, Alloiococcus otitidis
MFVTVLVIMFMVNWMLALVVLLTFPISAGCIYFIAPRAQKQFARQQKELGILTDQVEEVYAGHTIVKTYNREEDENARFVDQSAKLNDASTKAQFLSIIMMPLVSFARDLGYFGIGVFGGWGVINGTISIGHVQAFMQYVNQFSQPVRFIAQLSNTIQVTIASTERIFEIIDEEPMQKVEVDVPDKQDTPYKVEFEHVQFGYADDPEADLLMNDFNLQVKPGEMVAIVGPTGAGKSTLINLLERFYDVRGGSIYLDGVDTRHFNRSDLRKHMSMVLQDTWLFNGTIWENIAYGNDKYANDDEKILQAAKTANVDDFVRRLPKGYSTVINEESSNVSQGQRQLITIARAFLADPEILILDEATSSVDTRTEKQIQEAMENIIQERTSFVIAHRLSTIQDADKIIVMNHGDVIETGTHQELLDQGGFYADLYYAQFASSDDQAGDLAWDS

SEQ ID NO: 6185 - DNA, 1929 bp, Alloiococcus otitidis; identical to SEQ ID NO: 6183
  CDS (142)..(1926)

SEQ ID NO: 6186 - protein, 595 aa, Alloiococcus otitidis
MSRRKGIFIFAVIFGLAAIILNAIAPSVMAMATNEVIRAFQEAVSDNLSLTNLPINYDLIIQIIIAIVIIYLSQALLRYLESFLLAALSQATVYDLREHLKEKIETLPIKFFDTHGNGDIMSRAVNDMDQIANTLQQSLIQLVNGVIMFVTVLVIMFMVNWMLALVVLLTFPISAGCIYFIAPRAQKQFARQQKELGILTDQVEEVYAGHTIVKTYNREEDENARFVDQSAKLNDASTKAQFLSIIMMPLVSFARDLGYFGIGVFGGWGVINGTISIGHVQAFMQYVNQFSQPVRFIAQLSNTIQVTIASTERIFEIIDEEPMQKVEVDVPDKQDTPYKVEFEHVQFGYADDPEADLLMNDFNLQVKPGEMVAIVGPTGAGKSTLINLLERFYDVRGGSIYLDGVDTRHFNRSDLRKHMSMVLQDTWLFNGTIWENIAYGNDKYANDDEKILQAAKTANVDDFVRRLPKGYSTVINEESSNVSQGQRQLITIARAFLADPEILILDEATSSVDTRTEKQIQEAMENIIQERTSFVIAHRLSTIQDADKIIVMNHGDVIETGTHQELLDQGGFYADLYYAQFASSDDQAGDLAWDS

SEQ ID NO: 6187 - DNA, 1929 bp, Alloiococcus otitidis; identical to SEQ ID NO: 6183
  CDS (70)..(1926)

SEQ ID NO: 6188 - protein, 619 aa, Alloiococcus otitidis
MARQAHRKRHADDFWGTVWRLVQYMSRRKGIFIFAVIFGLAAIILNAIAPSVMAMATNEVIRAFQEAVSDNLSLTNLPINYDLIIQIIIAIVIIYLSQALLRYLESFLLAALSQATVYDLREHLKEKIETLPIKFFDTHGNGDIMSRAVNDMDQIANTLQQSLIQLVNGVIMFVTVLVIMFMVNWMLALVVLLTFPISAGCIYFIAPRAQKQFARQQKELGILTDQVEEVYAGHTIVKTYNREEDENARFVDQSAKLNDASTKAQFLSIIMMPLVSFARDLGYFGIGVFGGWGVINGTISIGHVQAFMQYVNQFSQPVRFIAQLSNTIQVTIASTERIFEIIDEEPMQKVEVDVPDKQDTPYKVEFEHVQFGYADDPEADLLMNDFNLQVKPGEMVAIVGPTGAGKSTLINLLERFYDVRGGSIYLDGVDTRHFNRSDLRKHMSMVLQDTWLFNGTIWENIAYGNDKYANDDEKILQAAKTANVDDFVRRLPKGYSTVINEESSNVSQGQRQLITIARAFLADPEILILDEATSSVDTRTEKQIQEAMENIIQERTSFVIAHRLSTIQDADKIIVMNHGDVIETGTHQELLDQGGFYADLYYAQFASSDDQAGDLAWDS

SEQ ID NO: 6189 - DNA, 1746 bp, Alloiococcus otitidis
  CDS (445)..(1743)
ccgagtagaaaaaggagagaattgttaatgttccgtttgtttaaagagatggagaccaagtatgtcgccctgtccatattcttgtcagcctgccgggtctttggcatgatcctcttgccaaccatgacagcggatattattgactacggtgtcttgcaagaagacatggactatattatccgacaaggtctgctcatgattggagtggccctcttggttattgcctttgcggtaggcagttcggtctttactgctagggaaacccaaaaattgggggagacggttcgtaaccgggcctttaaaaaaattgtcaacttttccaaagaggacctggaccagttcgggacagcttctttgattacccggaccaccaatgatgtcatgcagttgcagtttgtcatgctccaagtggtcattatgttaggggttgaccccttcttaatcttgggggccaccatcatggcctttacccgggagcctaagttggcttttgtctttattattactgcccctttaatggggctagccatctggttgattatgcggtcggcccagcccctcttccgccgcttgcaaagaaagacggatgaaattaaccggatcttccgagaaggattgaccggtgttcgggttgtccgagcctttaacaagagtcaatatgaagaagaccgctttgcttcttctaaccaggacttcaagtctatttccatcggggcatatgcccgcatggccctcatgatgccagtcttcttggtcgttatcatgctgaccaatatcatgatcctttggtttggggctaacctggtagggtctggtcagatgcaggtagggaacctagttgccttcttaacctatgccggcttgatcatgatggggattatgctcctagcccaagtcctgtcttttatccctcgaggccaaatcgcagctgaacggatcttggctatcttgaaccaccaatctactatcaaggatgacgaccatccagaccaggtcagcgaccagtctattgattttgcctttgaagacgttgacttccgctaccccaatgcagccaacctagccctagaagggattaacatggaagtcaaggccggccagaccttggccatcattggggggaccgggtctggtaaatctaccatcgccaaccttatgatccgcctttacgatgtagaatctggctccattaagctgaatggccaggacatccgctacattagtcaagaagacttgagagaccggattggttttgcccctcaagaggccatccttttttcaggtaccatccgagaaaacctcacctatggccacccaaacgccagtgaccaagagctctgggatgccttggaaatcgcccaagggaaggcctttgtggaaggtttggaagacggtttagatgccaaggtagaacaaggtgggggcaacttctctggtggccagcgccaacgcttgagtatcgcccgggccttggtaaccgatgccgacttgctggtttttgatgactccttctccgccttagactttaaaaccgatgctaacttaagggcagccttgacaccagtgactcgggataaggcagtggtcattattgcccaaagaatcagtacggttgtcaatgctgatgagattattgtccttgaagacggtcgggtcgtggggtctggtaaacatgaggacctcaaagaatcgaattcagtctaccaagaaattatccagtcacaaatgagaggggaggaagtttaa

SEQ ID NO: 6190 - protein, 433 aa, Alloiococcus otitidis
MGATIMAFTREPKLAFVFIITAPLMGLAIWLIMRSAQPLFRRLQRKTDEINRIFREGLTGVRVVRAFNKSQYEEDRFASSNQDFKSISIGAYARMALMMPVFLVVIMLTNIMILWFGANLVGSGQMQVGNLVAFLTYAGLIMMGIMLLAQVLSFIPRGQIAAERILAILNHQSTIKDDDHPDQVSDQSIDFAFEDVDFRYPNAANLALEGINMEVKAGQTLAIIGGTGSGKSTIANLMIRLYDVESGSIKLNGQDIRYISQEDLRDRIGFAPQEAILFSGTIRENLTYGHPNASDQELWDALEIAQGKAFVEGLEDGLDAKVEQGGGNFSGGQRQRLSIARALVTDADLLVFDDSFSALDFKTDANLRAALTPVTRDKAVVIIAQRISTVVNADEIIVLEDGRVVGSGKHEDLKESNSVYQEIIQSQMRGEEV

SEQ ID NO: 6191 - DNA, 1746 bp, Alloiococcus otitidis; identical to SEQ ID NO: 6189
  CDS (154)..(1743)

SEQ ID NO: 6192 - protein, 530 aa, Alloiococcus otitidis
MQEDMDYIIRQGLLMIGVALLVIAFAVGSSVFTARETQKLGETVRNRAFKKIVNFSKEDLDQFGTASLITRTTNDVMQLQFVMLQVVIMLGVDPFLILGATIMAFTREPKLAFVFIITAPLMGLAIWLIMRSAQPLFRRLQRKTDEINRIFREGLTGVRVVRAFNKSQYEEDRFASSNQDFKSISIGAYARMALMMPVFLVVIMLTNIMILWFGANLVGSGQMQVGNLVAFLTYAGLIMMGIMLLAQVLSFIPRGQIAAERILAILNHQSTIKDDDHPDQVSDQSIDFAFEDVDFRYPNAANLALEGINMEVKAGQTLAIIGGTGSGKSTIANLMIRLYDVESGSIKLNGQDIRYISQEDLRDRIGFAPQEAILFSGTIRENLTYGHPNASDQELWDALEIAQGKAFVEGLEDGLDAKVEQGGGNFSGGQRQRLSIARALVTDADLLVFDDSFSALDFKTDANLRAALTPVTRDKAVVIIAQRISTVVNADEIIVLEDGRVVGSGKHEDLKESNSVYQEIIQSQMRGEEV

SEQ ID NO: 6193 - DNA, 1746 bp, Alloiococcus otitidis; identical to SEQ ID NO: 6189
  CDS (28)..(1743)

SEQ ID NO: 6194 - protein, 572 aa, Alloiococcus otitidis
MFRLFKEMETKYVALSIFLSACRVFGMILLPTMTADIIDYGVLQEDMDYIIRQGLLMIGVALLVIAFAVGSSVFTARETQKLGETVRNRAFKKIVNFSKEDLDQFGTASLITRTTNDVMQLQFVMLQVVIMLGVDPFLILGATIMAFTREPKLAFVFIITAPLMGLAIWLIMRSAQPLFRRLQRKTDEINRIFREGLTGVRVVRAFNKSQYEEDRFASSNQDFKSISIGAYARMALMMPVFLVVIMLTNIMILWFGANLVGSGQMQVGNLVAFLTYAGLIMMGIMLLAQVLSFIPRGQIAAERILAILNHQSTIKDDDHPDQVSDQSIDFAFEDVDFRYPNAANLALEGINMEVKAGQTLAIIGGTGSGKSTIANLMIRLYDVESGSIKLNGQDIRYISQEDLRDRIGFAPQEAILFSGTIRENLTYGHPNASDQELWDALEIAQGKAFVEGLEDGLDAKVEQGGGNFSGGQRQRLSIARALVTDADLLVFDDSFSALDFKTDANLRAALTPVTRDKAVVIIAQRISTVVNADEIIVLEDGRVVGSGKHEDLKESNSVYQEIIQSQMRGEEV

SEQ ID NO: 6195 - DNA, 1746 bp, Alloiococcus otitidis; identical to SEQ ID NO: 6189
  CDS (22)..(1743)

SEQ ID NO: 6196 - protein, 574 aa, Alloiococcus otitidis
MLMFRLFKEMETKYVALSIFLSACRVFGMILLPTMTADIIDYGVLQEDMDYIIRQGLLMIGVALLVIAFAVGSSVFTARETQKLGETVRNRAFKKIVNFSKEDLDQFGTASLITRTTNDVMQLQFVMLQVVIMLGVDPFLILGATIMAFTREPKLAFVFIITAPLMGLAIWLIMRSAQPLFRRLQRKTDEINRIFREGLTGVRVVRAFNKSQYEEDRFASSNQDFKSISIGAYARMALMMPVFLVVIMLTNIMILWFGANLVGSGQMQVGNLVAFLTYAGLIMMGIMLLAQVLSFIPRGQIAAERILAILNHQSTIKDDDHPDQVSDQSIDFAFEDVDFRYPNAANLALEGINMEVKAGQTLAIIGGTGSGKSTIANLMIRLYDVESGSIKLNGQDIRYISQEDLRDRIGFAPQEAILFSGTIRENLTYGHPNASDQELWDALEIAQGKAFVEGLEDGLDAKVEQGGGNFSGGQRQRLSIARALVTDADLLVFDDSFSALDFKTDANLRAALTPVTRDKAVVIIAQRISTVVNADEIIVLEDGRVVGSGKHEDLKESNSVYQEIIQSQMRGEEV

SEQ ID NO: 6197 - DNA, 396 bp, Alloiococcus otitidis
  CDS (16)..(393)
actgaattcgattctttgaggtcctcatgtttaccagaccccacgacccgaccgtcttcaaggacaataatctcatcagcattgacaaccgtactgattctttgggcaataatgaccactgccttatcccgagtcactggtgtcaaggctgcccttaagttagcatcggttttaaagtctaaggcggagaaggagtcatcaaaaaccagcaagtcggcatcggttaccaaggcccgggcgatactcaagcgttggcgctggccaccagagaagttgcccccaccttgttctaccttggcatctaaaccgtcttccaaaccttccacaaaggccttcccttgggcgatttccaaggcatcccagagctcttggtcactggcgtttgggtggccatag

SEQ ID NO: 6198 - protein, 126 aa, Alloiococcus otitidis
MRSSCLPDPTTRPSSRTIISSALTTVLILWAIMTTALSRVTGVKAALKLASVLKSKAEKESSKTSKSASVTKARAILKRWRWPPEKLPPPCSTLASKPSSKPSTKAFPWAISKASQSSWSLAFGWP

SEQ ID NO: 6199 - DNA, 483 bp, Alloiococcus otitidis
  CDS (4)..(480)
ctcttgttaaaggctcggacaacccgaacaccggtcaatccttctcggaagatccggttaatttcatccgtctttctttgcaagcggcggaagaggggctgggccgaccgcataatcaaccagatggctagccccattaaaggggcagtaataataaagacaaaagccaacttaggctcccgggtaaaggccatgatggtggcccccaagattaagaaggggtcaacccctaacataatgaccacttggagcatgacaaactgcaactgcatgacatcattggtggtccgggtaatcaaagaagctgtcccgaactggtccaggtcctctttggaaaagttgacaatttttttaaaggcccggttacgaaccgtctcccccaatttttgggtttccctagcagtaaagaccgaactgcctaccgcaaaggcaataaccaagagggccactccaatcatgagcagaccttgtcggataatatag

SEQ ID NO: 6200 - protein, 159 aa, Alloiococcus otitidis
MLKARTTRTPVNPSRKIRLISSVFLCKRRKRGWADRIINQMASPIKGAVIIKTKANLGSRVKAMMVAPKIKKGSTPNIMTTWSMTNCNCMTSLVVRVIKEAVPNWSRSSLEKLTIFLKARLRTVSPNFWVSLAVKTELPTAKAITKRATPIMSRPCRII

SEQ ID NO: 6201 - DNA, 636 bp, Alloiococcus otitidis
  CDS (13)..(633)
tgggaggcaaacatgccaagacaaactttttttaaccttcccgaggaaaagaaagaccggattatccaaggggctatggctgttttttcgaccaaggccctcaatgaggcctctgttgccgaaattgtggaccaggctggtatttcccgggggagtttttaccaatactttgaagataaattagacttgtaccttcacttgattggtctttttaagcggaactaccacaacttgctgatgacttgctttaaaaagaaccaaggagacttttatgcctcttataaaagttatagtcgttattatattgacaatatcaccaagtctaagaaatttggcttttttgaaaaactatacctcaatatgaactatgccttaaaccgtgagagtatcaacttgatgtttacggatcgccataagagtgccttatatgaagtggttcgcttagataatttgaagatttccacgaaggctgagttgttagaggtcttgcagtttctccacgaactcttgaacaatagtattatggagggcttttggaagaatgcaccggttgaggtgacccaagaccattttatcaaacggctagactgggtcttttacgggattagccgagtagaaaaaggagagaattgttaa

SEQ ID NO: 6202 - protein, 207 aa, Alloiococcus otitidis
MPRQTFFNLPEEKKDRIIQGAMAVFSTKALNEASVAEIVDQAGISRGSFYQYFEDKLDLYLHLIGLFKRNYHNLLMTCFKKNQGDFYASYKSYSRYYIDNITKSKKFGFFEKLYLNMNYALNRESINLMFTDRHKSALYEVVRLDNLKISTKAELLEVLQFLHELLNNSIMEGFWKNAPVEVTQDHFIKRLDWVFYGISRVEKGENC

SEQ ID NO: 6203 - DNA, 1164 bp, Alloiococcus otitidis
  CDS (913)..(1161)
ggtgagacaatgaaatttagtctaagtcagtttagaaaaaaccacaagtttatctttttcctgttggtctcttttttggttcttttaaacctcttcctactcttacaaatgaggccttttctgagtccgattttacaagccttgcagattgtgtctgcccccttgattgcctcggtcattacctactatgtctttaaaccctttgtcgattttatgaataaaaagggtgtaccccgggtggcttccgttatcattgtcttcctggcaatcttggccttgattggcggggccattgtctttattgtcccgattatcaacaaccaggtcgaagccatcatccaagagttcccatcctactggcagcaggctgttaacttctttgaagaggaaattggggctgactttgtggcccaaatcttagaaacagtttcccaaaccaatattttagaaaatgctgccaaccagtttcaaactgtcctatcagcaaccttgggtgggatcgggagtgtgatcagcgtcaccgcccaggtggtcatcactatctttaccgttccttttatcctatactttatgttagttgatgggtcaaaaattgcccaaggactggtcaaagttacccccacccggatgaagcatactgtccgtaaatttttgtccaatgttaacctccagttgggtatttatgtccgtggccagatttttgttgctatctgcgttgccattatctttttaatcggctatgccattatcggcctcaactatttcttggtcttggctattatcgctggtttctttaacctagtcccttacttgggttcttttatttcaggcctactagctgcagcagtggccttatttcaagaccccatcctccttgtttacttagctatcctctttatcattgaacaaattttggaaaatcgggttatccaaccttatattctgggtagccagttgaatattcaccccattaccattctctttatcctcttaatcgccggtagtctctttggcgtcttgggcctcctcttaggggtgccagcctatgccatcatcaagattgtggtcagcatggcctttgaatacgtcaaagaagaaacggacttgtaccatgaggaccaaggacatgccagtcaagcagccgtcttgaaagaccaggactag

SEQ ID NO: 6204 - protein, 83 aa, Alloiococcus otitidis
MENRVIQPYILGSQLNIHPITILFILLIAGSLFGVLGLLLGVPAYAIIKIVVSMAFEYVKEETDLYHEDQGHASQAAVLKDQD

SEQ ID NO: 6205 - DNA, 1164 bp, Alloiococcus otitidis; identical to SEQ ID NO: 6203
  CDS (214)..(1161)

SEQ ID NO: 6206 - protein, 316 aa, Alloiococcus otitidis
MNKKGVPRVASVIIVFLAILALIGGAIVFIVPIINNQVEAIIQEFPSYWQQAVNFFEEEIGADFVAQILETVSQTNILENAANQFQTVLSATLGGIGSVISVTAQVVITIFTVPFILYFMLVDGSKIAQGLVKVTPTRMKHTVRKFLSNVNLQLGIYVRGQIFVAICVAIIFLIGYAIIGLNYFLVLAIIAGFFNLVPYLGSFISGLLAAAVALFQDPILLVYLAILFIIEQILENRVIQPYILGSQLNIHPITILFILLIAGSLFGVLGLLLGVPAYAIIKIVVSMAFEYVKEETDLYHEDQGHASQAAVLKDQD

SEQ ID NO: 6207 - DNA, 1164 bp, Alloiococcus otitidis; identical to SEQ ID NO: 6203
  CDS (109)..(1161)

SEQ ID NO: 6208 - protein, 351 aa, Alloiococcus otitidis
MRPFLSPILQALQIVSAPLIASVITYYVFKPFVDFMNKKGVPRVASVIIVFLAILALIGGAIVFIVPIINNQVEAIIQEFPSYWQQAVNFFEEEIGADFVAQILETVSQTNILENAANQFQTVLSATLGGIGSVISVTAQVVITIFTVPFILYFMLVDGSKIAQGLVKVTPTRMKHTVRKFLSNVNLQLGIYVRGQIFVAICVAIIFLIGYAIIGLNYFLVLAIIAGFFNLVPYLGSFISGLLAAAVALFQDPILLVYLAILFIIEQILENRVIQPYILGSQLNIHPITILFILLIAGSLFGVLGLLLGVPAYAIIKIVVSMAFEYVKEETDLYHEDQGHASQAAVLKDQD

SEQ ID NO: 6209 - DNA, 1164 bp, Alloiococcus otitidis; identical to SEQ ID NO: 6203
  CDS (10)..(1161)

SEQ ID NO: 6210 - protein, 384 aa, Alloiococcus otitidis
MKFSLSQFRKNHKFIFFLLVSFLVLLNLFLLLQMRPFLSPILQALQIVSAPLIASVITYYVFKPFVDFMNKKGVPRVASVIIVFLAILALIGGAIVFIVPIINNQVEAIIQEFPSYWQQAVNFFEEEIGADFVAQILETVSQTNILENAANQFQTVLSATLGGIGSVISVTAQVVITIFTVPFILYFMLVDGSKIAQGLVKVTPTRMKHTVRKFLSNVNLQLGIYVRGQIFVAICVAIIFLIGYAIIGLNYFLVLAIIAGFFNLVPYLGSFISGLLAAAVALFQDPILLVYLAILFIIEQILENRVIQPYILGSQLNIHPITILFILLIAGSLFGVLGLLLGVPAYAIIKIVVSMAFEYVKEETDLYHEDQGHASQAAVLKDQD

SEQ ID NO: 6211 - DNA, 1053 bp, Alloiococcus otitidis
  CDS (19)..(1050)
atgagaggagtaggcaagatgattaaaaaaattttactgggaacttacacgagaggggaaagtcaaggcatctaccaaattgatcttgatccatcccaaaaaaaattaaacaatttgcagctagtccaagaaatagacaacccaacctacttaagtttaaaccaggatcagtccttcctattttcagtggtaaaggaaggagaccaaggtggagtcgcctctttcaagaaagagagggatggctcctaccaattacaagataaggccctgcaagaaggtccacccccctgctatttggcctatgaccaaggccggcacttgctttattcagccaactaccacctaggcagtctccaagtctaccgtgtggacccacaggggcagattagcttggccgatagcctaagccaccagggatccggaccccatcccaaccaagaaggccctcatgcccactactttgatcaaagtccagatggcaactacctaatctcttgtgacctgggaacagaccaggtccagacctaccatgtcaaccaggaaggcaagattagccaagtagcctgcctagaccttgagcctggctctggcccccgccacctaaccttccaccccgacggtagccatgcctacttgtttaccgaactaaccagtcaaatttacctcctggactaccaggccgaccagggcagttttcagattttagaccaagtctccagcctgcctgaagactttgagggagaaagtagcggggcagccatcaagctgacccaagacggtaaatatttatatgcctccaaccgaggccacaattccctggttacctaccaaatccaagacaactacaccttaacggaccccgcttggaccccaacgtatggccagacccccagagacttcgccctatcccctgaagaagatttagtcctcgtgggccaccaagaccagaatgtcctgaccctctttgaacgaaccccccaggatggtcgcttgagcctccttgaaaaagatgtctacgccccagaagttgtctgccttaaatttttaaattaa

SEQ ID NO: 6212 - protein, 344 aa, Alloiococcus otitidis
MIKKILLGTYTRGESQGIYQIDLDPSQKKLNNLQLVQEIDNPTYLSLNQDQSFLFSVVKEGDQGGVASFKKERDGSYQLQDKALQEGPPPCYLAYDQGRHLLYSANYHLGSLQVYRVDPQGQISLADSLSHQGSGPHPNQEGPHAHYFDQSPDGNYLISCDLGTDQVQTYHVNQEGKISQVACLDLEPGSGPRHLTFHPDGSHAYLFTELTSQIYLLDYQADQGSFQILDQVSSLPEDFEGESSGAAIKLTQDGKYLYASNRGHNSLVTYQIQDNYTLTDPAWTPTYGQTPRDFALSPEEDLVLVGHQDQNVLTLFERTPQDGRLSLLEKDVYAPEVVCLKFLN

SEQ ID NO: 6213 - DNA, 1053 bp, Alloiococcus otitidis; identical to SEQ ID NO: 6211
  CDS (1)..(1050)

SEQ ID NO: 6214 - protein, 350 aa, Alloiococcus otitidis
MRGVGKMIKKILLGTYTRGESQGIYQIDLDPSQKKLNNLQLVQEIDNPTYLSLNQDQSFLFSVVKEGDQGGVASFKKERDGSYQLQDKALQEGPPPCYLAYDQGRHLLYSANYHLGSLQVYRVDPQGQISLADSLSHQGSGPHPNQEGPHAHYFDQSPDGNYLISCDLGTDQVQTYHVNQEGKISQVACLDLEPGSGPRHLTFHPDGSHAYLFTELTSQIYLLDYQADQGSFQILDQVSSLPEDFEGESSGAAIKLTQDGKYLYASNRGHNSLVTYQIQDNYTLTDPAWTPTYGQTPRDFALSPEEDLVLVGHQDQNVLTLFERTPQDGRLSLLEKDVYAPEVVCLKFLN

SEQ ID NO: 6215 - DNA, 537 bp, Alloiococcus otitidis
  CDS (7)..(534)
ccaagaatgggattatttgattttctaaaaggtgacaaaggcaaagaccaggaccaaaaccctcaaaagaccaaaaccgtaacctttaccaacccagtagaaggcgaagttgtaaccattgaagaagtagatgacccagttttttcacaaaaaatgatgggggatggctatggggtccgtcctgaaagtggggaaatttatgcccctggaacagggaaggttgtatccgtttttcctacccagcacgccgttggtttagagtttgaaaatggcattgaagtcttggtccacattgggatcgatacggtcgaattagatgggggcccctttgataccgtggtcaaagaaggcgacgaggtaaccccagacaccctaatttccacagtcgatttacaaggcttggaaaagtctggcaaggacgacaccattattgtggtctttaccaatatggataaggtagaaggctttgacctccaagtgaccggcaagactagccagggagctgaacttggccaagtgaccagcaagggtgaataa

SEQ ID NO: 6216 - protein, 176 aa, Alloiococcus otitidis
MGLFDFLKGDKGKDQDQNPQKTKTVTFTNPVEGEVVTIEEVDDPVFSQKMMGDGYGVRPESGEIYAPGTGKVVSVFPTQHAVGLEFENGIEVLVHIGIDTVELDGGPFDTVVKEGDEVTPDTLISTVDLQGLEKSGKDDTIIVVFTNMDKVEGFDLQVTGKTSQGAELGQVTSKGE

SEQ ID NO: 6217 - DNA, 426 bp, Alloiococcus otitidis
  CDS (19)..(423)
atttttaaattaagtcaaatgaagttaaaaaagctagctaggtttctcactacaagaaacctagctagccttttaactaccgatctttattcacccttgctggtcacttggccaagttcagctccctggctagtcttgccggtcacttggaggtcaaagccttctaccttatccatattggtaaagaccacaataatggtgtcgtccttgccagacttttccaagccttgtaaatcgactgtggaaattagggtgtctggggttacctcgtcgccttctttgaccacggtatcaaaggggcccccatctaattcgaccgtatcgatcccaatgtggaccaagacttcaatgccattttcaaactctaaaccaacggcgtgctgggtaggaaaaacggatacaaccttccctgttccaggggcataa

SEQ ID NO: 6218 - protein, 135 aa, Alloiococcus otitidis
MKLKKLARFLTTRNLASLLTTDLYSPLLVTWPSSAPWLVLPVTWRSKPSTLSILVKTTIMVSSLPDFSKPCKSTVEIRVSGVTSSPSLTTVSKGPPSNSTVSIPMWTKTSMPFSNSKPTACWVGKTDTTFPVPGA

SEQ ID NO: 6219 - DNA, 834 bp, Alloiococcus otitidis
  CDS (10)..(831)
gagttacatatgtttatcgaaattattaaaaccattatcttaggtatcgtccaaggtatcacagaatggctccccatctctagtaccggccacatgatcctagtagatgaattgatcaccttaaacgtcacccccgaattccgggaaatgtttctggtggtcatccagctggcctccgtcttggccgtcatcctcctctacttccatgagcttaaccctatcgccttcagcaagtccaaggaccaaaaggaagagacttggaatatttggttcaaggttattgtaggggttatccctgctggggttatgggcctgctattcgacgacctaattgaccagtacttcttcaattggttgacagttgccatcatgttaatcgtctacggcattgcctttattattatcgagcactacaacaaggaccggaccttccccatccaaacttggggaagcttaagctataaaactgccttcttaatcgggtgcttccaagtcctcgccttgattcctgggacatcccggtctggcgctaccattgtcggtgcccttttgatcggaaccgcccgacccattgccgctaagttttcctttttcctctccatccccgtcatgctaggagccagcctactgaaactcttaggcttcggtctatctttcaccactggggaattaaccatcctcttggttggctgcctggtttcctttgccgtttccgttatcgccatcaagttcttgatggcctacatccgccgcaatgattttaccgcttttggttggtaccgaattgtggtagggattatcgtcattgcctactttggctttatagccggttaa

SEQ ID NO: 6220 - protein, 274 aa, Alloiococcus otitidis
MFIEIIKTIILGIVQGITEWLPISSTGHMILVDELITLNVTPEFREMFLVVIQLASVLAVILLYFHELNPIAFSKSKDQKEETWNIWFKVIVGVIPAGVMGLLFDDLIDQYFFNWLTVAIMLIVYGIAFIIIEHYNKDRTFPIQTWGSLSYKTAFLIGCFQVLALIPGTSRSGATIVGALLIGTARPIAAKFSFFLSIPVMLGASLLKLLGFGLSFTTGELTILLVGCLVSFAVSVIAIKFLMAYIRRNDFTAFGWYRIVVGIIVIAYFGFIAG

SEQ ID NO: 6221 - DNA, 1329 bp, Alloiococcus otitidis
  CDS (994)..(1326)
ttgtttaattgttcgggaacagtctatatttccccagttaaatgtggtaggatagggttaacattttctattaaggaggatcttatggatcaatactttaaattaagtgagaaaggaaccagtattcaaaccgaaatcttggctggtttgattaccttcttttcttcttcttacatactatttgtccaccccgttatgctaagtgaagctggcgtgccccaagtcttaagtctcttggcaactatctttattgctattgtagccagtttaaccatgggcctttatgcaaatacccccttggtcatggcaccaggtcttgggatgacggcttatttcgcctataccttggttggtggtttgggctttacctggcaggaaagcttggggattaccattgtctccagtttaatctttgtcttgttaacctttactggggttattgaaagcttccgtttgtccatccccttagaactcaaaaaagccatcaccattggaatcggcctctttctcgtccggattgggcttgaaaatgctggcttcctcctagaagatggctttaattggtcttggcttggttttattggccttcttattgtcttagtcttgaccctctttaaggtcaagggggccttcttgattgccattgccttgattacggctatcttttggatttttacagatggactggaggtatcttccaccaatgccttgttggaacttagcaattattttgatcttttagacattcaattctccaacatgatctctatcaatggcctgatagctatcttctcctttgtcatgcttttaatctttcaagccttgggcattgtagaggcctttgtggaagaccgtgaagaagcgaaaaaaagctaccaggtcgtttcagtgatgagtgtcttatctggcctcttcggaaccagtcctgccattaccctgtccgaaaatggggctgggatcctagaagggggacggacaggcttgtccaccagtgtggctggtttactctttttagtcgccttgtttgtcaccccgctcttctcctacattccagcggttgcagcaggcccagtcattgtctttaccggcttatctatgggtaaactcatcaccagcatcgaagtgccccactggtccttgtggctgccggccattgtgatcatcttaagcatccccttgtctggtagtatcgtgtccggtatggcttatggctttgtcctttaccccgtcattgccttcatcttcggccaaaaaggtcgcttgaatccaactaacctgaccatttccttcttgtttttactcctgttagtcgttgaaattttcctctaa

SEQ ID NO: 6222 - protein, 111 aa, Alloiococcus otitidis
MAGLLFLVALFVTPLFSYIPAVAAGPVIVFTGLSMGKLITSIEVPHWSLWLPAIVIILSIPLSGSIVSGMAYGFVLYPVIAFIFGQKGRLNPTNLTISFLFLLLLVVEIFL

SEQ ID NO: 6223 - DNA, 1329 bp, Alloiococcus otitidis; identical to SEQ ID NO: 6221
  CDS (982)..(1326)

SEQ ID NO: 6224 - protein, 115 aa, Alloiococcus otitidis
MSTSVAGLLFLVALFVTPLFSYIPAVAAGPVIVFTGLSMGKLITSIEVPHWSLWLPAIVIILSIPLSGSIVSGMAYGFVLYPVIAFIFGQKGRLNPTNLTISFLFLLLLVVEIFL

SEQ ID NO: 6225 - DNA, 1329 bp, Alloiococcus otitidis; identical to SEQ ID NO: 6221
  CDS (760)..(1326)

SEQ ID NO: 6226 - protein, 189 aa, Alloiococcus otitidis
MISINGLIAIFSFVMLLIFQALGIVEAFVEDREEAKKSYQVVSVMSVLSGLFGTSPAITLSENGAGILEGGRTGLSTSVAGLLFLVALFVTPLFSYIPAVAAGPVIVFTGLSMGKLITSIEVPHWSLWLPAIVIILSIPLSGSIVSGMAYGFVLYPVIAFIFGQKGRLNPTNLTISFLFLLLLVVEIFL

SEQ ID NO: 6227 - DNA, 1329 bp, Alloiococcus otitidis; identical to SEQ ID NO: 6221
  CDS (604)..(1326)

SEQ ID NO: 6228 - protein, 241 aa, Alloiococcus otitidis
MTLFKVKGAFLIAIALITAIFWIFTDGLEVSSTNALLELSNYFDLLDIQFSNMISINGLIAIFSFVMLLIFQALGIVEAFVEDREEAKKSYQVVSVMSVLSGLFGTSPAITLSENGAGILEGGRTGLSTSVAGLLFLVALFVTPLFSYIPAVAAGPVIVFTGLSMGKLITSIEVPHWSLWLPAIVIILSIPLSGSIVSGMAYGFVLYPVIAFIFGQKGRLNPTNLTISFLFLLLLVVEIFL

SEQ ID NO: 6229 - DNA, 1329 bp, Alloiococcus otitidis; identical to SEQ ID NO: 6221
  CDS (196)..(1326)

SEQ ID NO: 6230 - protein, 377 aa, Alloiococcus otitidis
MLSEAGVPQVLSLLATIFIAIVASLTMGLYANTPLVMAPGLGMTAYFAYTLVGGLGFTWQESLGITIVSSLIFVLLTFTGVIESFRLSIPLELKKAITIGIGLFLVRIGLENAGFLLEDGFNWSWLGFIGLLIVLVLTLFKVKGAFLIAIALITAIFWIFTDGLEVSSTNALLELSNYFDLLDIQFSNMISINGLIAIFSFVMLLIFQALGIVEAFVEDREEAKKSYQVVSVMSVLSGLFGTSPAITLSENGAGILEGGRTGLSTSVAGLLFLVALFVTPLFSYIPAVAAGPVIVFTGLSMGKLITSIEVPHWSLWLPAIVIILSIPLSGSIVSGMAYGFVLYPVIAFIFGQKGRLNPTNLTISFLFLLLLVVEIFL

SEQ ID NO: 6231 - DNA, 1329 bp, Alloiococcus otitidis; identical to SEQ ID NO: 6221
  CDS (85)..(1326)

SEQ ID NO: 6232 - protein, 414 aa, Alloiococcus otitidis
MDQYFKLSEKGTSIQTEILAGLITFFSSSYILFVHPVMLSEAGVPQVLSLLATIFIAIVASLTMGLYANTPLVMAPGLGMTAYFAYTLVGGLGFTWQESLGITIVSSLIFVLLTFTGVIESFRLSIPLELKKAITIGIGLFLVRIGLENAGFLLEDGFNWSWLGFIGLLIVLVLTLFKVKGAFLIAIALITAIFWIFTDGLEVSSTNALLELSNYFDLLDIQFSNMISINGLIAIFSFVMLLIFQALGIVEAFVEDREEAKKSYQVVSVMSVLSGLFGTSPAITLSENGAGILEGGRTGLSTSVAGLLFLVALFVTPLFSYIPAVAAGPVIVFTGLSMGKLITSIEVPHWSLWLPAIVIILSIPLSGSIVSGMAYGFVLYPVIAFIFGQKGRLNPTNLTISFLFLLLLVVEIFL

SEQ ID NO: 6233 - DNA, 1329 bp, Alloiococcus otitidis; identical to SEQ ID NO: 6221
  CDS (1)..(1326)

SEQ ID NO: 6234 - protein, 442 aa, Alloiococcus otitidis
MFNCSGTVYISPVKCGRIGLTFSIKEDLMDQYFKLSEKGTSIQTEILAGLITFFSSSYILFVHPVMLSEAGVPQVLSLLATIFIAIVASLTMGLYANTPLVMAPGLGMTAYFAYTLVGGLGFTWQESLGITIVSSLIFVLLTFTGVIESFRLSIPLELKKAITIGIGLFLVRIGLENAGFLLEDGFNWSWLGFIGLLIVLVLTLFKVKGAFLIAIALITAIFWIFTDGLEVSSTNALLELSNYFDLLDIQFSNMISINGLIAIFSFVMLLIFQALGIVEAFVEDREEAKKSYQVVSVMSVLSGLFGTSPAITLSENGAGILEGGRTGLSTSVAGLLFLVALFVTPLFSYIPAVAAGPVIVFTGLSMGKLITSIEVPHWSLWLPAIVIILSIPLSGSIVSGMAYGFVLYPVIAFIFGQKGRLNPTNLTISFLFLLLLVVEIFL

SEQ ID NO: 6235 - DNA, 639 bp, Alloiococcus otitidis
  CDS (22)..(636)
gggaaaaggaaggaggataatatggaagggattacactcacctttatctttatgggcctggccatagcggtcatgacttcccacaccaaggcaggcgttttactatcaggtttagcaaccgttttttacttctaccttgttgactttaacagttggattcccattgttttatttatcctaggcttactccttgttgtgacggaggtcttgataccagatttcggtttgattggattcttgggaatcgcttctgtcatcggtggcctctaccttaccttgggcgacttgggtcagaccatccaagatataagtatcgccatagtcattactgcaggcttagtcctttacctagctaagcaaggctactccctagccaactttagccgctttgttttaacctcatcggaagaaaaccagcaaagtaagaagaaaatcaaccgcaagctagaggaaggaaatgaaggcatttcagagacaacgttaagaccatctggcaaggctatctttaatgaagaggatggactcatctatgatgtccttagcgcagaaggccatatttccaaggggacccctattgtgatcgaaaaaataagcggaactaaaatactcgtccgtaaattaaagaaaaaaggagactag

SEQ ID NO: 6236 - protein, 205 aa, Alloiococcus otitidis
MEGITLTFIFMGLAIAVMTSHTKAGVLLSGLATVFYFYLVDFNSWIPIVLFILGLLLVVTEVLIPDFGLIGFLGIASVIGGLYLTLGDLGQTIQDISIAIVITAGLVLYLAKQGYSLANFSRFVLTSSEENQQSKKKINRKLEEGNEGISETTLRPSGKAIFNEEDGLIYDVLSAEGHISKGTPIVIEKISGTKILVRKLKKKGD

SEQ ID NO: 6237 - DNA, 528 bp, Alloiococcus otitidis
  CDS (130)..(525)
tctaagacgcctaagttgccatctcttaaagcttgggcaatggcttgtgggactagggcttgggcttccacaactttagcccgttgtttttggacttcagcccgcatttcttgttcttcggcaacagccatggaccgacgttcttcagctttagcttgggcgatatttttgtctgcatcagactggtctctttggagcttggccccaatgttgcggccaacgtctaagtcagcaatatcaatggataggatttcaaaggctgtaccggaatccagtcctttagccaatacggtcttggtgatggagtccgggttttccaagacggacttgtgttcactggctgaaccgacagtagtgacaatcccttcaccgacccgggcaataatggtgtcttcaccagccccaccgactaagcgttcaatgttggcccggacagtgactttggctttagcaataatttcgatcccgtctttggcaacggctgaaatatttggggtgacgataacttttggggtgacggacacttga

SEQ ID NO: 6238 - protein, 132 aa, Alloiococcus otitidis
MDRRSSALAWAIFLSASDWSLWSLAPMLRPTSKSAISMDRISKAVPESSPLANTVLVMESGFSKTDLCSLAEPTVVTIPSPTRAIMVSSPAPPTKRSMLARTVTLALAIISIPSLATAEIFGVTITFGVTDT

SEQ ID NO: 6239 - DNA, 528 bp, Alloiococcus otitidis; identical to SEQ ID NO: 6237
  CDS (40)..(525)

SEQ ID NO: 6240 - protein, 162 aa, Alloiococcus otitidis
MACGTRAWASTTLARCFWTSARISCSSATAMDRRSSALAWAIFLSASDWSLWSLAPMLRPTSKSAISMDRISKAVPESSPLANTVLVMESGFSKTDLCSLAEPTVVTIPSPTRAIMVSSPAPPTKRSMLARTVTLALAIISIPSLATAEIFGVTITFGVTDT

SEQ ID NO: 6241 - DNA, 528 bp, Alloiococcus otitidis; identical to SEQ ID NO: 6237
  CDS (16)..(525)

SEQ ID NO: 6242 - protein, 170 aa, Alloiococcus otitidis
MPSLKAWAMACGTRAWASTTLARCFWTSARISCSSATAMDRRSSALAWAIFLSASDWSLWSLAPMLRPTSKSAISMDRISKAVPESSPLANTVLVMESGFSKTDLCSLAEPTVVTIPSPTRAIMVSSPAPPTKRSMLARTVTLALAIISIPSLATAEIFGVTITFGVTDT

SEQ ID NO: 6243 - DNA, 993 bp, Alloiococcus otitidis
  CDS (4)..(990)
ctaatggattctacactaattggcgtcattattgttgcacttctggtcattgtcgctttggccctcttcctccgttttgtccccatcggcctgtggatttcggcctacttctccggggtcaaaatttcgatcggaacccttgtggggatgcggttccgtcgggtcaagcccaattccattatcaaccctttaattaaggcaactaaggccggcctagtcttaaacactgaccagctagaggcccactacctagctggcggtagcgtggatgatgtcatcgacgccctcattgcttcccaaagagctaacatagacctggaatttgaggaagcagccgctattgacctggcaggccggaatgtttttgaagcagttcaagtgtccgtcaccccaaaagttatcgtcaccccaaatatttcagccgttgccaaagacgggatcgaaattattgctaaagccaaagtcactgtccgggccaacattgaacgcttagtcggtggggctggtgaagacaccattattgcccgggtcggtgaagggattgtcactactgtcggttcagccagtgaacacaagtccgtcttggaaaacccggactccatcaccaagaccgtattggctaaaggactggattccggtacagcctttgaaatcctatccattgatattgctgacttagacgttggccgcaacattggggccaagctccaaagagaccagtctgatgcagacaaaaatatcgcccaagctaaagctgaagaacgtcggtccatggctgttgccgaagaacaagaaatgcgggctgaagtccaaaaacaacgggctaaagttgtggaagcccaagccctagtcccacaagccattgcccaagctttaagagatggcaacttaggcgtcttagactacctcaaaatgcaaaatttaaatgccgataccgacatgcgccaggccatctctggcaaggacgacagcagtccacaagacggagagtag

SEQ ID NO: 6244 - protein, 329 aa, Alloiococcus otitidis
MDSTLIGVIIVALLVIVALALFLRFVPIGLWISAYFSGVKISIGTLVGMRFRRVKPNSIINPLIKATKAGLVLNTDQLEAHYLAGGSVDDVIDALIASQRANIDLEFEEAAAIDLAGRNVFEAVQVSVTPKVIVTPNISAVAKDGIEIIAKAKVTVRANIERLVGGAGEDTIIARVGEGIVTTVGSASEHKSVLENPDSITKTVLAKGLDSGTAFEILSIDIADLDVGRNIGAKLQRDQSDADKNIAQAKAEERRSMAVAEEQEMRAEVQKQRAKVVEAQALVPQAIAQALRDGNLGVLDYLKMQNLNADTDMRQAISGKDDSSPQDGE

SEQ ID NO: 6245 - DNA, 336 bp, Alloiococcus otitidis
  CDS (76)..(333)
ctgaatctctccttgatagatctggttgcccgagctggaattaatttcaccagaccagtctggatcagattttgcttgcgagcggttgcccttggtttggttctgagtcttagacccttgtttggcccgatttttttctgtagtctgctgactcgcctgtctcttactggattgttttgcctttcttttagcttgcttttctttttgtcttcttttcttcctgcttgcttttgggtcttggtcgagtcttgcttgaggagaccttcttggatttgctttaggtctttcttgcttttgggcatttttgacccaatcggcctggtatttttcaagtag

SEQ ID NO: 6246 - protein, 86 aa, Alloiococcus otitidis
MRAVALGLVLSLRPLFGPIFFCSLLTRLSLTGLFCLSFSLLFFLSSFLPACFWVLVESCLRRPSWICFRSFLLLGIFDPIGLVFFK

SEQ ID NO: 6247 - DNA, 633 bp, Alloiococcus otitidis
  CDS (109)..(630)
atgccacttttttacctctttagcctcatatttaccctcctgccctttttagtcatcggcttcatcgtcttgattatcttccaagccactagccagtctagaaaaaaggtgaaaggcacgctcaagccctcctccctacttgaaaaataccaggccgattgggtcaaaaatgcccaaaagcaagaaagacctaaagcaaatccaagaaggtctcctcaagcaagactcgaccaagacccaaaagcaagcaggaagaaaagaagacaaaaagaaaagcaagctaaaagaaaggcaaaacaatccagtaagagacaggcgagtcagcagactacagaaaaaaatcgggccaaacaagggtctaagactcagaaccaaaccaagggcaaccgctcgcaagcaaaatctgatccagactggtctggtgaaattaattccagctcgggcaaccagatctatcaaggagagattcagtcaatatttgataaaaagcagtatgatcatagacaaaacttgaatcaagttcaaaacttaggtcaacaagtggctaaaaacttgaagcgtgaccaactgaaacaggctatgatctacaaagaaattcttgataagcccaagtccttatccgatgatttgtaa

SEQ ID NO: 6248 - protein, 174 aa, Alloiococcus otitidis
MKGTLKPSSLLEKYQADWVKNAQKQERPKANPRRSPQARLDQDPKASRKKRRQKEKQAKRKAKQSSKRQASQQTTEKNRAKQGSKTQNQTKGNRSQAKSDPDWSGEINSSSGNQIYQGEIQSIFDKKQYDHRQNLNQVQNLGQQVAKNLKRDQLKQAMIYKEILDKPKSLSDDL

SEQ ID NO: 6249 - DNA, 633 bp, Alloiococcus otitidis; identical to SEQ ID NO: 6247
  CDS (1)..(630)

SEQ ID NO: 6250 - protein, 210 aa, Alloiococcus otitidis
MPLFYLFSLIFTLLPFLVIGFIVLIIFQATSQSRKKVKGTLKPSSLLEKYQADWVKNAQKQERPKANPRRSPQARLDQDPKASRKKRRQKEKQAKRKAKQSSKRQASQQTTEKNRAKQGSKTQNQTKGNRSQAKSDPDWSGEINSSSGNQIYQGEIQSIFDKKQYDHRQNLNQVQNLGQQVAKNLKRDQLKQAMIYKEILDKPKSLSDDL

SEQ ID NO: 6251 - DNA, 480 bp, Alloiococcus otitidis
  CDS (13)..(477)
ggataccgactaatgtctgagaaatttgcaatagagattatcttttacacatcagaagggaagtataaaatgattaatctattcacatcaccaagttgtacatcttgccgtaaagccaaggcttggttagaggagcaaggtctagactataaagaaaaaaacatctaccacgaacctctaacaagagatgaaattaaagagatcctgatgttgactgaagagggaacagacgaaattatttcataccggtctcaggcttataaaaacttagaagttgaaatcgaagacttgtctatgaacgagttgctcgatttattcattaaagaacccagtcttatccgccgtcctattattatggacgaccgaagactgcaaattggttataacgaagaagaaatccgcactttccttcctcgtgaagcaagagaagtcgagttgagcgagatccgcatgaaacttgttgaagaagaaattgcataa

SEQ ID NO: 6252 - protein, 155 aa, Alloiococcus otitidis
MSEKFAIEIIFYTSEGKYKMINLFTSPSCTSCRKAKAWLEEQGLDYKEKNIYHEPLTRDEIKEILMLTEEGTDEIISYRSQAYKNLEVEIEDLSMNELLDLFIKEPSLIRRPIIMDDRRLQIGYNEEEIRTFLPREAREVELSEIRMKLVEEEIA

SEQ ID NO: 6253 - DNA, 1254 bp, Alloiococcus otitidis
  CDS (838)..(1251)
ggaaaaatatcctttatgattttggcttgtggtatgatggaagagagtgaaaaaatagagaggtggaagcaaatgacaaatttcgacaatgtaagagaccggcaccagaccaattctgctaagtgggatgggcttgccgaccgttttggaagtgacgaccctaacttgctagctatgtgggtggcggacatggactttgaccctgcaccggccatcaaggaaagcttacaagacttagctgtcaaccatgtcttgggttataccattccgtctgatgacttttaccaaagtcagatcgactggtacaaggaccgccaccaggtggacctgcaaaaatcagacatactcctatctcctggggtagtggggtctattggagctgtcattcaagcagtgactggcaaggatgatggggtgatgattcatgaccctgcctacaatggttttatcaaaattctaagggccaacaagcgtaaaatagttaaatcccctctgattattgaagctggcaaatttgtcatggattatgaccaaattgaagctgagtttaaaaagggtgaggtcaaactctttgtcctcagtaacccccacaacccagggggccgggtctggactagagaagaactggtgaaattggctgatctctgtcaagaatatggtgtttacctcatatcagatgaaattcacatcgacttaacttatccggaaaacaaggccacttcagcctataccctggatgaaaaatactttgaccagctacttgtcctccactcagctaccaagactttcaatattgccggggtcaagtgttcagctatttttgtcaaaaacgaagaattgaaagacaagatccaatctacccaagccctcctggctcattcggccatctccagctttggtttggtggcgacccaggccgcatttgcccaaagccgagactggcagcagaacctcttggcttacttggaccaaaaccgccagttgattgttgactttttccaagaaaacttaccccaagtggactttatcaaaccggaagctacttacttgttttggtttgacgccaaagatattggtctagaagggaaagaattagaagacttcttcacccaagaagggcaagtggccttggtgaatggactaaactacggcgaaacttccccaacttggatgcgacttaactttgctactagccgggaaaatgtccaagaaggtcttaaccggatcaagtcttgctttgataaaaaaacatag

SEQ ID NO: 6254 - protein, 138 aa, Alloiococcus otitidis
MKDKIQSTQALLAHSAISSFGLVATQAAFAQSRDWQQNLLAYLDQNRQLIVDFFQENLPQVDFIKPEATYLFWFDAKDIGLEGKELEDFFTQEGQVALVNGLNYGETSPTWMRLNFATSRENVQEGLNRIKSCFDKKT

SEQ ID NO: 6255 - DNA, 1254 bp, Alloiococcus otitidis; identical to SEQ ID NO: 6253
  CDS (34)..(1251)

SEQ ID NO: 6256 - protein, 406 aa, Alloiococcus otitidis
MMEESEKIERWKQMTNFDNVRDRHQTNSAKWDGLADRFGSDDPNLLAMWVADMDFDPAPAIKESLQDLAVNHVLGYTIPSDDFYQSQIDWYKDRHQVDLQKSDILLSPGVVGSIGAVIQAVTGKDDGVMIHDPAYNGFIKILRANKRKIVKSPLIIEAGKFVMDYDQIEAEFKKGEVKLFVLSNPHNPGGRVWTREELVKLADLCQEYGVYLISDEIHIDLTYPENKATSAYTLDEKYFDQLLVLHSATKTFNIAGVKCSAIFVKNEELKDKIQSTQALLAHSAISSFGLVATQAAFAQSRDWQQNLLAYLDQNRQLIVDFFQENLPQVDFIKPEATYLFWFDAKDIGLEGKELEDFFTQEGQVALVNGLNYGETSPTWMRLNFATSRENVQEGLNRIKSCFDKKT

SEQ ID NO: 6257 - DNA, 1254 bp, Alloiococcus otitidis; identical to SEQ ID NO: 6253
  CDS (16)..(1251)

SEQ ID NO: 6258 - protein, 412 aa, Alloiococcus otitidis
MILACGMMEESEKIERWKQMTNFDNVRDRHQTNSAKWDGLADRFGSDDPNLLAMWVADMDFDPAPAIKESLQDLAVNHVLGYTIPSDDFYQSQIDWYKDRHQVDLQKSDILLSPGVVGSIGAVIQAVTGKDDGVMIHDPAYNGFIKILRANKRKIVKSPLIIEAGKFVMDYDQIEAEFKKGEVKLFVLSNPHNPGGRVWTREELVKLADLCQEYGVYLISDEIHIDLTYPENKATSAYTLDEKYFDQLLVLHSATKTFNIAGVKCSAIFVKNEELKDKIQSTQALLAHSAISSFGLVATQAAFAQSRDWQQNLLAYLDQNRQLIVDFFQENLPQVDFIKPEATYLFWFDAKDIGLEGKELEDFFTQEGQVALVNGLNYGETSPTWMRLNFATSRENVQEGLNRIKSCFDKKT

SEQ ID NO: 6259 - DNA, 261 bp, Alloiococcus otitidis
  CDS (13)..(258)
cccaagacatggttgacagctaagtcttgtaagctttccttgatggccggtgcagggtcaaagtccatgtccgccacccacatagctagcaagttagggtcgtcacttccaaaacggtcggcaagcccatcccacttagcagaattggtctggtgccggtctcttacattgtcgaaatttgtcatttgcttccacctctctattttttcactctcttccatcataccacaagccaaaatcataaaggatatttttccctag

SEQ ID NO: 6260 - protein, 82 aa, Alloiococcus otitidis
MTAKSCKLSLMAGAGSKSMSATHIASKLGSSLPKRSASPSHLAELVWCRSLTLSKFVICFHLSIFSLSSIIPQAKIIKDIFP

SEQ ID NO: 6261 - DNA, 2190 bp, Alloiococcus otitidis
  CDS (25)..(2187)
tggaaaggaatagagaagcagtatatgaatattgaagaatcaattaaagcaaacttgttaaaagacctgagtgattttacgaccaagcaagtcaccagtgtattggacctcttggaagaagggaatacggttccttttattgcccgctaccggaaagaccaaacgggggccttagatgaagtccaaatccggaccatccaagaccgctaccattacttaaaaaacttacaagaccggaaagagaccgtgatggagtctattgccagccagagcaagttgagccaggatttaaaagaggctatcctgcaggcagaccagcttcaggaagtggaagacctctaccgtccttataagaaaaaacgtcggaccaaggccagccaggctaaagaagccggcttacaagccttggcagactggcttttgaccttctccgaccaggatatagagatcaaggcccaggattttattgacccagataagggggtcgattccagccaagctgcactagacggggcttttgagattattgcagaagcagtaggcgacaagccggaataccgcaagcgtctgcgggactttatgcgctataatgccctctatacttccaaggtcaaggatgaaaatgacgaccccaagggtatttaccagaattactacgactattcagaaagttaccgaaccattgcccaccaccgggttttggccttgaatcggggagaggaagctggcgtcctgtcggtcagtttagactgcgatcctagccgggtgcaagattatgtctataagcaagaaattccggaccaagttgacaacccggccagccagctagtcaaagaggccattgatgcagcctttaaacgtttcattcaaccagcgattgaacgagaactccggtctgataggacccaagccgcagaagaccaggccatccaggtttttggcgacaatttgaggaacttgctcttgcaaccaccccttaaagaccaggtcgtcttgggattggacccagcctttcgaactggttgcaagctagccgtggtggataaaacaggcaaggtcttagccattaaggtcatttatccccacaacggcaagaaaaaataccaggaggccaaggcccaattaaccgacctggttcaaaagtaccaagtcgacacagttgccatcgggaatgggactgctagtcgggagtcggaacaatttgtcagcgaagtggtccaagaccttgaccgatttgtagcctacgtcattgttagtgaagcgggggcttcggtttactcagccagcgatgaggccagacgggaattccccgacctccaagtagaagaaagaagtgctgtctccatcgcccgccgcctacaagaccccttggctgaactggttaaaattgatcccaagtcgatcggggtaggccagtaccagcatgacctatcccaggctaaattgacggaccaattgaacttcgtagtggagacggctgtcaaccaagtcggcgttaacctcaatacagcttcggctagtcttttggaacacgtttccggcttgacccaggctacagcccaaaatattgtggcttaccgggaagacaaaggccagtataccgagcgacagcaaatcaagtcggttaaacggttaggtcccaaaacctaccagcaggcagtgggattcttacggattccgaatggggctgaaccctttgaccagaccggcattcaccctgaatcctaccaggaagcagaagtcattttgacagaattaggttttagcaaggaccaggttgggtcaaaagacttggctaaccaagtcaagaaggttgacgaccaggccttgcttgaggcaactggattaggacgggaaagctaccaggatatcatccagggcttggttaagcctggccgtgacatgcgtgacgaccggccagcccccttgcttcgccaagacgtccttaagatggaagacctcaaggaagggatgcaattagaagggaccgtccgtaatgtggttgattttggtgccttcgtggatattggggtcaaggaagatggcctagtccatatttccaaaatgagtaaggactacaccaaccaccccagagaccgggtatcggtgggggacattgtcacggtttggattgatggtgtcgatttagacaagggccggatttccttaaccatggtagacaagggttag

SEQ ID NO: 6262 - protein, 721 aa, Alloiococcus otitidis
MNIEESIKANLLKDLSDFTTKQVTSVLDLLEEGNTVPFIARYRKDQTGALDEVQIRTIQDRYHYLKNLQDRKETVMESIASQSKLSQDLKEAILQADQLQEVEDLYRPYKKKRRTKASQAKEAGLQALADWLLTFSDQDIEIKAQDFIDPDKGVDSSQAALDGAFEIIAEAVGDKPEYRKRLRDFMRYNALYTSKVKDENDDPKGIYQNYYDYSESYRTIAHHRVLALNRGEEAGVLSVSLDCDPSRVQDYVYKQEIPDQVDNPASQLVKEAIDAAFKRFIQPAIERELRSDRTQAAEDQAIQVFGDNLRNLLLQPPLKDQVVLGLDPAFRTGCKLAVVDKTGKVLAIKVIYPHNGKKKYQEAKAQLTDLVQKYQVDTVAIGNGTASRESEQFVSEVVQDLDRFVAYVIVSEAGASVYSASDEARREFPDLQVEERSAVSIARRLQDPLAELVKIDPKSIGVGQYQHDLSQAKLTDQLNFVVETAVNQVGVNLNTASASLLEHVSGLTQATAQNIVAYREDKGQYTERQQIKSVKRLGPKTYQQAVGFLRIPNGAEPFDQTGIHPESYQEAEVILTELGFSKDQVGSKDLANQVKKVDDQALLEATGLGRESYQDIIQGLVKPGRDMRDDRPAPLLRQDVLKMEDLKEGMQLEGTVRNVVDFGAFVDIGVKEDGLVHISKMSKDYTNHPRDRVSVGDIVTVWIDGVDLDKGRISLTMVDKG

SEQ ID NO: 6263 - DNA, 966 bp, Alloiococcus otitidis
  CDS (46)..(963)
atttgttataatagtagtaagaaaatcggtaaaggagataggacaatgaattggaaaaaatggttgggcttaattgtcgtcctagccctaattgtttttgttggctattctttagtaaccagtggccaagaggatggggagggtcttgaggttcggactgaccaagtccagcggtcctctatcagtgaagaagtgacgagtcagggtctaattcaagccgttgaccagcaagaagttgtgggaaccggtttagtcaaaggccttcaggttgctgaaggagaccaggttgctgaaggagacaccctagtggattaccttgaaatgggggaggtcacagctgactttgacggaactgtcacccaggttaatattgaagctgatacagcagacagcaatgcccaacaaggccaaccctctatattagttgagagtttggataatctagaggtcaagttagacttgtcccaaaacgatgcccaagacatcagcctggaagattcggttagcttagactaccatggccaagaattccaaggccaagtcagctacctagccccatctgctagcaaccctggacaggaaagccaagctgccttgtctggccaacaatccagcaacaccctagaagcaagggttgactttgacgacgaccaggacttagaccccttggtggctggctttgaaattgacctggccatcaccgtggacgaaaaagacgatgctctcttggctcccattgaagctgtcatatttgacgaccagggtcaagctatcctctttaaagtagaagacggccaagccagacaagtccttatcgaaaccggtctccaatcagacttatacattgaggttgcagacatggttgatggcgaactccaagaaggcgaccaggtgattttatcaccggaagaaggcttagctgacggcgaccaggtcaaagtcaaagaccaaaaagctacaggctaa

SEQ ID NO: 6264 - protein, 306 aa, Alloiococcus otitidis
MNWKKWLGLIVVLALIVFVGYSLVTSGQEDGEGLEVRTDQVQRSSISEEVTSQGLIQAVDQQEVVGTGLVKGLQVAEGDQVAEGDTLVDYLEMGEVTADFDGTVTQVNIEADTADSNAQQGQPSILVESLDNLEVKLDLSQNDAQDISLEDSVSLDYHGQEFQGQVSYLAPSASNPGQESQAALSGQQSSNTLEARVDFDDDQDLDPLVAGFEIDLAITVDEKDDALLAPIEAVIFDDQGQAILFKVEDGQARQVLIETGLQSDLYIEVADMVDGELQEGDQVILSPEEGLADGDQVKVKDQKATG

SEQ ID NO: 6265 - DNA, 447 bp, Alloiococcus otitidis
  CDS (184)..(444)
cggccatgcacgatagtgtcttccatttgggcatttaagtactggaggtcgggtgtcccaaaggtcaaaaatccgaactggttgccagattggttggatgaaatacgaccgttgatttggtttgggggagacaggtgctcgatttcatcaatgttttctttgaggaagtctaaatcttctagggtgatcaagtcccgctcttcctggtcaggatcggcagccaggctaatcgttgtagccccaatatccgcaaaggtctgggtcatctcttcagtagctccattccccactgataaaattgagataacagaggcagtcccaataataattcctagcatggttagaaatgaccgcatcttgttggcaacaatggaatccatggccattttaaaattttccacaatcataggtcgcccacctccttgctggtcaggatttcttggttga

SEQ ID NO: 6266 - protein, 87 aa, Alloiococcus otitidis
MIKSRSSWSGSAARLIVVAPISAKVWVISSVAPFPTDKIEITEAVPIIIPSMVRNDRILLATMESMAILKFSTIIGRPPPCWSGFLG

SEQ ID NO: 6267 - DNA, 447 bp, Alloiococcus otitidis; identical to SEQ ID NO: 6265
  CDS (151)..(444)

SEQ ID NO: 6268 - protein, 98 aa, Alloiococcus otitidis
MFSLRKSKSSRVIKSRSSWSGSAARLIVVAPISAKVWVISSVAPFPTDKIEITEAVPIIIPSMVRNDRILLATMESMAILKFSTIIGRPPPCWSGFLG

SEQ ID NO: 6269 - DNA, 756 bp, Alloiococcus otitidis
  CDS (43)..(753)
ttgagtcaagctgctatcctaggaagacaaggagtctttagcatgataaagattgaagatatcgtaaaaagctaccaaaccggtcaggaaatcgtcaaggcggtggaccatgtctccttgtcgatcgaagcgggtgagtttacggctatcatgggccccagtgggtcgggcaagtccaccatcatgaatattttagggcttttggacaagttcgactccgggtcttactctttaaatggaattgatgtgactgaccacgacaaggatgagttggcccggatccggaatgaagaaatcggttttgtcttccaatccttcaacctcctgccacggatgaacctcttggacaatgtcatgctccccttagtttatgccaaagtcccccttaaggaacgccaggaccgggccaagcaagccttggaccgggtaggcttaagtgaccgtctctaccatgcaaccaatgaaatctcagggggacaaagtcaacgcgtcgctatcgcccgagctatcgtcaacaatccttctgtcataatggctgacgagcctaccggtaacttagattccaagacgaccaaacagattatgaagcttttccaagacttgaatgaggaagggtcaactatcattatggtcacccatgagcctgaaatggctgtttataccaagcggattgtccacgtccgggatggccaagtagaaaaagatgaaaaaatcaaccaagaaatcctgaccagcaaggaggtgggcgacctatga

SEQ ID NO: 6270 - protein, 237 aa, Alloiococcus otitidis
MIKIEDIVKSYQTGQEIVKAVDHVSLSIEAGEFTAIMGPSGSGKSTIMNILGLLDKFDSGSYSLNGIDVTDHDKDELARIRNEEIGFVFQSFNLLPRMNLLDNVMLPLVYAKVPLKERQDRAKQALDRVGLSDRLYHATNEISGGQSQRVAIARAIVNNPSVIMADEPTGNLDSKTTKQIMKLFQDLNEEGSTIIMVTHEPEMAVYTKRIVHVRDGQVEKDEKINQEILTSKEVGDL

SEQ ID NO: 6271 - DNA, 756 bp, Alloiococcus otitidis; identical to SEQ ID NO: 6269
  CDS (1)..(753)

SEQ ID NO: 6272 - protein, 251 aa, Alloiococcus otitidis
MSQAAILGRQGVFSMIKIEDIVKSYQTGQEIVKAVDHVSLSIEAGEFTAIMGPSGSGKSTIMNILGLLDKFDSGSYSLNGIDVTDHDKDELARIRNEEIGFVFQSFNLLPRMNLLDNVMLPLVYAKVPLKERQDRAKQALDRVGLSDRLYHATNEISGGQSQRVAIARAIVNNPSVIMADEPTGNLDSKTTKQIMKLFQDLNEEGSTIIMVTHEPEMAVYTKRIVHVRDGQVEKDEKINQEILTSKEVGDL

SEQ ID NO: 6273 - DNA, 1266 bp, Alloiococcus otitidis
  CDS (1027)..(1263)
aaaaatcaaccaagaaatcctgaccagcaaggaggtgggcgacctatgattgtggaaaattttaaaatggccatggattccattgttgccaacaagatgcggtcatttctaaccatgctaggaattattattgggactgcctctgttatctcaattttatcagtggggaatggagctactgaagagatgacccagacctttgcggatattggggctacaacgattagcctggctgccgatcctgaccaggaagagcgggacttgatcaccctagaagatttagacttcctcaaagaaaacattgatgaaatcgagcacctgtctcccccaaaccaaatcaacggtcgtatttcatccaaccaatctggcaaccagttcggatttttgacctttgggacacccgacctccagtacttaaatgcccaaatggaagacactatcgtgcatggccgctacttcaaccaaaatgacctgcaagtgggcaatgatgtcgctattgtggattcggacacggcccagcgactctttaaccgaacagatgttgttggggaaagtatccagttcactgctcgcgataccactttaaacttcacaattatcggggtaatggaaggccggttctcagagctacagggggagtttgttgaagaaggcatgcctgtttttatcgccgctcccctgtcgaccattgaaaattatttccctatcgaaagccggattaataacgttttagttcaagttaccaataccagtgacattgagcccgtctccaaccaaatggtccggctcttggagctccgtcatgaccaggctggccaagatacttatacagccaccaactttttaaatgccctcaaccagctggaaggtttactaggcctctttatcaactttatcgcagcagttgctgggatcgccctcctggttggtggaatcggggtcatgaatattatgctggtctctgtgaccgaacgaacccgggaaatcggggtccgtaaggctttaggagccactaccggcaatatcttggggcaattcttgatggaatccttgattatcagcctcttgggcggtttaatcggtttggtaattggcattgtcgcctccaacctgatcgcttctgccttaaacattacgaccagcttaaccctaggagctgtcctcttagcccttggattctccagtggggtcggcatcttctttggctactacccggctaggaaggccgccaacctcaatccgattgatgccttaagacatgaataa

SEQ ID NO: 6274 - protein, 79 aa, Alloiococcus otitidis
MGQFLMESLIISLLGGLIGLVIGIVASNLIASALNITTSLTLGAVLLALGFSSGVGIFFGYYPARKAANLNPIDALRHE

SEQ ID NO: 6275 - DNA, 1266 bp, Alloiococcus otitidis; identical to SEQ ID NO: 6273
  CDS (46)..(1263)

SEQ ID NO: 6276 - protein, 406 aa, Alloiococcus otitidis
MIVENFKMAMDSIVANKMRSFLTMLGIIIGTASVISILSVGNGATEEMTQTFADIGATTISLAADPDQEERDLITLEDLDFLKENIDEIEHLSPPNQINGRISSNQSGNQFGFLTFGTPDLQYLNAQMEDTIVHGRYFNQNDLQVGNDVAIVDSDTAQRLFNRTDVVGESIQFTARDTTLNFTIIGVMEGRFSELQGEFVEEGMPVFIAAPLSTIENYFPIESRINNVLVQVTNTSDIEPVSNQMVRLLELRHDQAGQDTYTATNFLNALNQLEGLLGLFINFIAAVAGIALLVGGIGVMNIMLVSVTERTREIGVRKALGATTGNILGQFLMESLIISLLGGLIGLVIGIVASNLIASALNITTSLTLGAVLLALGFSSGVGIFFGYYPARKAANLNPIDALRHE

SEQ ID NO: 6277 - DNA, 1383 bp, Alloiococcus otitidis
  CDS (25)..(1380)
gaaactagtaaaaggagcgacattatgactgatacaaaccattatgattaccttgtaattggcggtggcagtggcgggattgcttctgcaaatcgggcagctgaacggggggccaaggttgccttaattgagcgcaaccaacttggaggaacctgtgtcaaccgtggttgtgtccctaaaaaaattatgtggtatgcagctaagacctaccacggtttggatgcttacggcccaggctatgggatttcgacccaaggcaagtccttgaactttgctgaattagtcaaaaatcgtgaagaatatatcgaccgcctccaccaggcctatcaaaatggcctagacagcaactcggttgaccacatcaccgggactgctcgttttattgacagccagaccctggatgtggatggtcaaacctacactggagaccggatcttaattgcgactggtggtcggcctgaaaaattagacattccgggcagtgaatacggcatcgactcagacggcttttttaatctgaccgacctgcctgaccgggtggctatctatggcgctggttatgttggggtggaacttcacggcctcttgcactccttggagtcagattctcacctcttcttccgccgggaccttcccttaaccaagttcgatgactttatccgggaaaaatacacggaaatcattaaggctgacggcctccaggttcatggcaataaagaaatcaaggaagtagaaaaacaagacgatggttccttgctcctccacttcagtgatgggtctagccatgaaaccgacaccctcatatgggccaccggtcgccagcccaatacggaaaatcttggcctagaaaacacccaggtagagctagacaaaaaaggccatgtcaaggtggacaagtaccaggaaactactgatgaccacatctattccattggggatgtgaccggggccatccaattaacccctgtggctattgcagcaggtagacggctgtctgaccgactctataatcatatgcctgaccgtcacttggactacgtcaatattccaacggttgtctttacccacccaccgattgggacagttggattgaccgaagcccaggccatcgaccagtatggcaaggaccaggttaagtgctacaccaatggctttaatgccatgcactcccagcttgccgatcaccggcaaaaggcttggatgaagttagtagttgcaggtccagaagagaaagtagtcggcctccatggggttggcgaagggatggatgaacttctccaaggctttgcggtagccatccggatgggggcaagcaaggcagaccttgatgatactgttgccatccacccaacttcagctgaggaatttgtaaccatgcggtaa

SEQ ID NO: 6278 - protein, 452 aa, Alloiococcus otitidis
MTDTNHYDYLVIGGGSGGIASANRAAERGAKVALIERNQLGGTCVNRGCVPKKIMWYAAKTYHGLDAYGPGYGISTQGKSLNFAELVKNREEYIDRLHQAYQNGLDSNSVDHITGTARFIDSQTLDVDGQTYTGDRILIATGGRPEKLDIPGSEYGIDSDGFFNLTDLPDRVAIYGAGYVGVELHGLLHSLESDSHLFFRRDLPLTKFDDFIREKYTEIIKADGLQVHGNKEIKEVEKQDDGSLLLHFSDGSSHETDTLIWATGRQPNTENLGLENTQVELDKKGHVKVDKYQETTDDHIYSIGDVTGAIQLTPVAIAAGRRLSDRLYNHMPDRHLDYVNIPTVVFTHPPIGTVGLTEAQAIDQYGKDQVKCYTNGFNAMHSQLADHRQKAWMKLVVAGPEEKVVGLHGVGEGMDELLQGFAVAIRMGASKADLDDTVAIHPTSAEEFVTMR

SEQ ID NO: 6279 - DNA, 639 bp, Alloiococcus otitidis
  CDS (76)..(636)
gtcctagctgagattttgctttatcataaaagttccgctatactacaagcaaataacttagaaaagagagaagccatgcttgatgcaaaagaatattggattttgttcaaatcaacctttaccctcagtgcctttagctttgggggaggctatagtatcgtccccttgatgcaagaacagtttgttgacaaactccactggattgatgaagatgaaatgctggacctggttgccctgggtcaatccgctcctggccccattgctgtcaatactgctattttgatcggctaccaaaaggatggggtcttaggagccttgctttcaactttgggaacagtcctcccacctctaattatcatgactttggtctcctatatctatttttttatccgagacaatgccttaatcaacaatatcctgatgggcatggcaggtgggattgcagccattattgtcaatgccgtctacaatatggccaaacaaatagtcgtccggcgcaatcttgtccaaattattgtgatggtcctggccttggtggctgccgttattttccagattaatatcatttatatattaattctagccgcaagtgtaggcctaatcaccagcctggtcaagggcaaaggaggtcaggcatga

SEQ ID NO: 6280 - protein, 187 aa, Alloiococcus otitidis
MLDAKEYWILFKSTFTLSAFSFGGGYSIVPLMQEQFVDKLHWIDEDEMLDLVALGQSAPGPIAVNTAILIGYQKDGVLGALLSTLGTVLPPLIIMTLVSYIYFFIRDNALINNILMGMAGGIAAIIVNAVYNMAKQIVVRRNLVQIIVMVLALVAAVIFQINIIYILILAASVGLITSLVKGKGGQA

SEQ ID NO: 6281 - DNA, 639 bp, Alloiococcus otitidis; identical to SEQ ID NO: 6279
  CDS (16)..(636)

SEQ ID NO: 6282 - protein, 207 aa, Alloiococcus otitidis
MLYHKSSAILQANNLEKREAMLDAKEYWILFKSTFTLSAFSFGGGYSIVPLMQEQFVDKLHWIDEDEMLDLVALGQSAPGPIAVNTAILIGYQKDGVLGALLSTLGTVLPPLIIMTLVSYIYFFIRDNALINNILMGMAGGIAAIIVNAVYNMAKQIVVRRNLVQIIVMVLALVAAVIFQINIIYILILAASVGLITSLVKGKGGQA

SEQ ID NO: 6283 - DNA, 279 bp, Alloiococcus otitidis
  CDS (55)..(276)
gccagcaccataacaatcaagagggaagggaggacgaccccaatagtggctacaatgccccctgtcaccccagccacattatttccagcagcagttgcagcattaatggcaatgggtcccggggtcatttcagacaaggtcaggacatcgacaaattcctccaggctgagccaggacaagttttggaccagttcttcttcgattaaaggcaagacggctaaaccgccaccgaagctcaaggccccaattttcataaaggtgatgaaaagttgccagtag

SEQ ID NO: 6284 - protein, 74 aa, Alloiococcus otitidis
MPPVTPATLFPAAVAALMAMGPGVISDKVRTSTNSSRLSQDKFWTSSSSIKGKTAKPPPKLKAPIFIKVMKSCQ

SEQ ID NO: 6285 - DNA, 279 bp, Alloiococcus otitidis; identical to SEQ ID NO: 6283
  CDS (46)..(276)

SEQ ID NO: 6286 - protein, 77 aa, Alloiococcus otitidis
MATMPPVTPATLFPAAVAALMAMGPGVISDKVRTSTNSSRLSQDKFWTSSSSIKGKTAKPPPKLKAPIFIKVMKSCQ

SEQ ID NO: 6287 - DNA, 639 bp, Alloiococcus otitidis
  CDS (76)..(636)
tatcatttatatattaattctagccgcaagtgtaggcctaatcaccagcctggtcaagggcaaaggaggtcaggcatgatctactggcaacttttcatcacctttatgaaaattggggccttgagcttcggtggcggtttagccgtcttgcctttaatcgaagaagaactggtccaaaacttgtcctggctcagcctggaggaatttgtcgatgtcctgaccttgtctgaaatgaccccgggacccattgccattaatgctgcaactgctgctggaaataatgtggctggggtgacagggggcattgtagccactattggggtcgtcctcccttccctcttgattgttatggtgctggcttatatctactttaaataccgcaatctttccctcttccagggagcgattgcaggactccggccagcggtagtagccttgattgcctctgctggtgtcaccattttcatgaccgccctcttcaatacttcttcatttgacgtgaacttagccgacctcaacctcattaacttggctatcttctttttagccctctatggcttgcgaaaaattagactgaccaccatccaaaccattattttgtctggcctggtcggtggtatcctcttctccattttgtag

SEQ ID NO: 6288 - protein, 187 aa, Alloiococcus otitidis
MIYWQLFITFMKIGALSFGGGLAVLPLIEEELVQNLSWLSLEEFVDVLTLSEMTPGPIAINAATAAGNNVAGVTGGIVATIGVVLPSLLIVMVLAYIYFKYRNLSLFQGAIAGLRPAVVALIASAGVTIFMTALFNTSSFDVNLADLNLINLAIFFLALYGLRKIRLTTIQTIILSGLVGGILFSIL

SEQ ID NO: 6289 - DNA, 1191 bp, Alloiococcus otitidis
  CDS (790)..(1188)
gagctatggactgtatcgaatgtggtaactgttctttcatctgcccatccaacattccactccttgacaacatccgtggcgctaaagcagctattaatgccaaaaaagaagaggaggaataacatgtcgcagtcaattagtattgaagaagtccaaaagcaactccaatcttctccctcccctcacatccgacgtaagcgtcggtcccgggacattatgactgatgtgatgattgccctggtcccccccattatcgcagcagcctacttctttggctggtgggtctttgtccaaattgctgttggggttggggtgtcagccttggcagagtatggctaccagaaattatctgacaaaaaaatcaccctctatgaccgcagtgttttcgttaccggtcttttggtaggtctgtcctttcctgtatcttcccccttgtgggtcgttgcagcagcagccttgatcgctgtactaattgtgaagcattggaattttggctttggaccagggggattgggccgcaactacttaaacccagcccttaccgcccgagttgttgccaagatcttattccaaccagccttcgccaactggattttacccaatgggtttttctcaggtccatatggtggctttggtgtagacgctgtggcaactgccaccccgttggaatacttgaaccggggggcaacagaaatttccagccaaattcctgacttgtgggacctcttcttaggtgttgacgttggtggaaacattggtgaaacctccaaactggcaatcctaattgggatgatctacctgatcgtcagacgggtcatcaaccctaaagtacccctcctctttatcctaggtggcttcttagtcgcaaccttctggggtaacttcgatccattcttcagcttgacccacgtcttgtccggtaccttcctctttgtagctacatatatggtaacggactacagttcaggctgtttaacaccagaagggaagtcggtttttgccttctgtgccggtgccttgacggtgatactccggatagcaatcggtttccctggtgctgtcggtatttctgttatcattatgaacatctgtgcaccctttattgaccgagcatttatgccaaaaatctacggtcacaaccaacggccgaatgtggtctttgaccgtcaaaaagattctttagataaataa

SEQ ID NO: 6290 - protein, 133 aa, Alloiococcus otitidis
MIYLIVRRVINPKVPLLFILGGFLVATFWGNFDPFFSLTHVLSGTFLFVATYMVTDYSSGCLTPEGKSVFAFCAGALTVILRIAIGFPGAVGISVIIMNICAPFIDRAFMPKIYGHNQRPNVVFDRQKDSLDK

SEQ ID NO: 6291 - DNA, 1191 bp, Alloiococcus otitidis; identical to SEQ ID NO: 6289
  CDS (217)..(1188)

SEQ ID NO: 6292 - protein, 324 aa, Alloiococcus otitidis
MTDVMIALVPPIIAAAYFFGWWVFVQIAVGVGVSALAEYGYQKLSDKKITLYDRSVFVTGLLVGLSFPVSSPLWVVAAAALIAVLIVKHWNFGFGPGGLGRNYLNPALTARVVAKILFQPAFANWILPNGFFSGPYGGFGVDAVATATPLEYLNRGATEISSQIPDLWDLFLGVDVGGNIGETSKLAILIGMIYLIVRRVINPKVPLLFILGGFLVATFWGNFDPFFSLTHVLSGTFLFVATYMVTDYSSGCLTPEGKSVFAFCAGALTVILRIAIGFPGAVGISVIIMNICAPFIDRAFMPKIYGHNQRPNVVFDRQKDSLDK

SEQ ID NO: 6293 - DNA, 1191 bp, Alloiococcus otitidis; identical to SEQ ID NO: 6289
  CDS (97)..(1188)

SEQ ID NO: 6294 - protein, 364 aa, Alloiococcus otitidis
MPKKKRRNNMSQSISIEEVQKQLQSSPSPHIRRKRRSRDIMTDVMIALVPPIIAAAYFFGWWVFVQIAVGVGVSALAEYGYQKLSDKKITLYDRSVFVTGLLVGLSFPVSSPLWVVAAAALIAVLIVKHWNFGFGPGGLGRNYLNPALTARVVAKILFQPAFANWILPNGFFSGPYGGFGVDAVATATPLEYLNRGATEISSQIPDLWDLFLGVDVGGNIGETSKLAILIGMIYLIVRRVINPKVPLLFILGGFLVATFWGNFDPFFSLTHVLSGTFLFVATYMVTDYSSGCLTPEGKSVFAFCAGALTVILRIAIGFPGAVGISVIIMNICAPFIDRAFMPKIYGHNQRPNVVFDRQKDSLDK

SEQ ID NO: 6295 - DNA, 1191 bp, Alloiococcus otitidis; identical to SEQ ID NO: 6289
  CDS (64)..(1188)

SEQ ID NO: 6296 - protein, 375 aa, Alloiococcus otitidis
MTTSVALKQLLMPKKKRRNNMSQSISIEEVQKQLQSSPSPHIRRKRRSRDIMTDVMIALVPPIIAAAYFFGWWVFVQIAVGVGVSALAEYGYQKLSDKKITLYDRSVFVTGLLVGLSFPVSSPLWVVAAAALIAVLIVKHWNFGFGPGGLGRNYLNPALTARVVAKILFQPAFANWILPNGFFSGPYGGFGVDAVATATPLEYLNRGATEISSQIPDLWDLFLGVDVGGNIGETSKLAILIGMIYLIVRRVINPKVPLLFILGGFLVATFWGNFDPFFSLTHVLSGTFLFVATYMVTDYSSGCLTPEGKSVFAFCAGALTVILRIAIGFPGAVGISVIIMNICAPFIDRAFMPKIYGHNQRPNVVFDRQKDSLDK

SEQ ID NO: 6297 - DNA, 1191 bp, Alloiococcus otitidis; identical to SEQ ID NO: 6289
  CDS (22)..(1188)

SEQ ID NO: 6298 - protein, 389 aa, Alloiococcus otitidis
MVTVLSSAHPTFHSLTTSVALKQLLMPKKKRRNNMSQSISIEEVQKQLQSSPSPHIRRKRRSRDIMTDVMIALVPPIIAAAYFFGWWVFVQIAVGVGVSALAEYGYQKLSDKKITLYDRSVFVTGLLVGLSFPVSSPLWVVAAAALIAVLIVKHWNFGFGPGGLGRNYLNPALTARVVAKILFQPAFANWILPNGFFSGPYGGFGVDAVATATPLEYLNRGATEISSQIPDLWDLFLGVDVGGNIGETSKLAILIGMIYLIVRRVINPKVPLLFILGGFLVATFWGNFDPFFSLTHVLSGTFLFVATYMVTDYSSGCLTPEGKSVFAFCAGALTVILRIAIGFPGAVGISVIIMNICAPFIDRAFMPKIYGHNQRPNVVFDRQKDSLDK

SEQ ID NO: 6299 - DNA, 1365 bp, Alloiococcus otitidis
  CDS (31)..(1362)
gcgaagaacaagcggaaggaaggaattatcatggcgttttcttttatgcacaaagaaaaaggatcacaccctgatggtaataaacagtacacggagcacaaggaaattgttgatgctagcgtgccaaaattaatggtttaccccatcgcaatgcacattggggctccggcagaaccagttgtagaagttggcgatgaagttaaagcgggccaaatgattgcagaagaaggtggctttgtctcagcccatgtttattctggtgtctcaggtgaggtcgtcggcatcgaagaccgaccttctgatggcggtgggactgttaaaagtatcattatcaaaaacgactacaagtatacccaggctgatcccattatcgaacccggtcgttcccaccaattgtccaatgatgagatcttagataccgtacggaaggctggtatcgttgggatgggtggggcaactttcccaacagctgtcaagctcgacccaccagaaggaaccagcatcgataccattatcctcaacggggctgaatgtgaacccttctcaacttcagaccaccgtgttatgttagactatgcccaggaagtggttaagggactagaaattatttctagattatatccagggctgaccaaaacttatattggggttgaagacaacaaaaaagacgctattgaagtcttgaaaaatgaaactagccacatgaatgaggttactgtccgcaccctacctcacatgtacccacaaggttctgagaaaaacttgatccaaaacctcactggtcgggaagtaaaaccagatgaattgccagcagacaaacacatcatcttgctcaatgtgtctacttgccgggcaatttaccgggcttgtgagttaggtgaacccctcactgaacggattatatcagtagccggagcgcctttaaaagaacccaaaaacttaaaagtcaaaattgggaccccaatggactccattattgacgactgtggtggctttattgactacccaggtaaaattttatctggtggtcctatgatggggaaagtcatcaccgacttaggcgttccagttcccaaagggatgactgctttaaccatcttaaccaaggaagaagctgaagtcgaagaacgggaagactgtattatgtgtgctgagtgtctcaacgtttgcccagtcagcctgcaaccaattttgatctcggaagccttcgaacgcggtgagattgataaagctgagaaactaggagctatggactgtatcgaatgtggtaactgttctttcatctgcccatccaacattccactccttgacaacatccgtggcgctaaagcagctattaatgccaaaaaagaagaggaggaataa

SEQ ID NO: 6300 - protein, 444 aa, Alloiococcus otitidis
MAFSFMHKEKGSHPDGNKQYTEHKEIVDASVPKLMVYPIAMHIGAPAEPVVEVGDEVKAGQMIAEEGGFVSAHVYSGVSGEVVGIEDRPSDGGGTVKSIIIKNDYKYTQADPIIEPGRSHQLSNDEILDTVRKAGIVGMGGATFPTAVKLDPPEGTSIDTIILNGAECEPFSTSDHRVMLDYAQEVVKGLEIISRLYPGLTKTYIGVEDNKKDAIEVLKNETSHMNEVTVRTLPHMYPQGSEKNLIQNLTGREVKPDELPADKHIILLNVSTCRAIYRACELGEPLTERIISVAGAPLKEPKNLKVKIGTPMDSIIDDCGGFIDYPGKILSGGPMMGKVITDLGVPVPKGMTALTILTKEEAEVEEREDCIMCAECLNVCPVSLQPILISEAFERGEIDKAEKLGAMDCIECGNCSFICPSNIPLLDNIRGAKAAINAKKEEEE

SEQ ID NO: 6301 - DNA, 1143 bp, Alloiococcus otitidis
  CDS (313)..(1140)
ggccaaagtgaccatccgggaaagagagggataaaaatggctaagactagactagcagattatgacttagtaacggatcaatcgcctcatatctttgaaggctgggatagccagtggcaaatgctgcaagttatcctggccctaatgctaccaactttagcaggtgctatcctatttggaccgactgtcttaatccatgtagccattgctgtggcagtgaccgttttagtggagtgggtctatgagcgggccgttcgcaagcggtcaaccattcgtgacctgtcggcagttatcactgggatcttagtagccttgtccatgcccaatgggaccctctacgccactactggcctggtagccctcttggctatcttaatcaagctgatccctggtgggatggggtccaaccgctttaatccagcagtgacagccagggtcatccacttactattcccttggttttttaacttccaatttgtcggctggctaaatgatttctttggcctatccttggaccaggtttcgacggcttccctccaagcctatgtccctaacttagggccagatgcctatacaacggtgactcccctgatctttaacttccgtggcgggggcgacttttcaggagcccctcccttgtgggacctctttattggcaataccggtggctggggtggcgccatgggggaaacgtccaccctggtgatcttgattgccatggtttacctgatcctaagacgggtcattgtttggtacaaacctgttttattcatcgcgactgttgggatctttatgtacttttatggaggcatggacttggaatttatggcctatcacttactgagtgggtccctagtctttgcaggggtctttatggtgaccgattacccaacagccggcctgacccgaattggtcaaattgtctttcccattggggctggactcctggtgggcttgtttaggacccagggctttgccccagaaggtgtgggcttggccatagtaaccatgaatgccgtcattccatatgtggaccggttagccttcaacaaggtatacggtcataccgaccgtccctttttgggtatgggctacaatgaccgagaaccctttaaaaaagttgatccattagcagaaagataa

SEQ ID NO: 6302 - protein, 276 aa, Alloiococcus otitidis
MSMPNGTLYATTGLVALLAILIKLIPGGMGSNRFNPAVTARVIHLLFPWFFNFQFVGWLNDFFGLSLDQVSTASLQAYVPNLGPDAYTTVTPLIFNFRGGGDFSGAPPLWDLFIGNTGGWGGAMGETSTLVILIAMVYLILRRVIVWYKPVLFIATVGIFMYFYGGMDLEFMAYHLLSGSLVFAGVFMVTDYPTAGLTRIGQIVFPIGAGLLVGLFRTQGFAPEGVGLAIVTMNAVIPYVDRLAFNKVYGHTDRPFLGMGYNDREPFKKVDPLAER

SEQ ID NO: 6303 - DNA, 1143 bp, Alloiococcus otitidis; identical to SEQ ID NO: 6301
  CDS (121)..(1140)

SEQ ID NO: 6304 - protein, 340 aa, Alloiococcus otitidis
MLQVILALMLPTLAGAILFGPTVLIHVAIAVAVTVLVEWVYERAVRKRSTIRDLSAVITGILVALSMPNGTLYATTGLVALLAILIKLIPGGMGSNRFNPAVTARVIHLLFPWFFNFQFVGWLNDFFGLSLDQVSTASLQAYVPNLGPDAYTTVTPLIFNFRGGGDFSGAPPLWDLFIGNTGGWGGAMGETSTLVILIAMVYLILRRVIVWYKPVLFIATVGIFMYFYGGMDLEFMAYHLLSGSLVFAGVFMVTDYPTAGLTRIGQIVFPIGAGLLVGLFRTQGFAPEGVGLAIVTMNAVIPYVDRLAFNKVYGHTDRPFLGMGYNDREPFKKVDPLAER

SEQ ID NO: 6305 - DNA, 1143 bp, Alloiococcus otitidis; identical to SEQ ID NO: 6301
  CDS (37)..(1140)

SEQ ID NO: 6306 - protein, 368 aa, Alloiococcus otitidis
MAKTRLADYDLVTDQSPHIFEGWDSQWQMLQVILALMLPTLAGAILFGPTVLIHVAIAVAVTVLVEWVYERAVRKRSTIRDLSAVITGILVALSMPNGTLYATTGLVALLAILIKLIPGGMGSNRFNPAVTARVIHLLFPWFFNFQFVGWLNDFFGLSLDQVSTASLQAYVPNLGPDAYTTVTPLIFNFRGGGDFSGAPPLWDLFIGNTGGWGGAMGETSTLVILIAMVYLILRRVIVWYKPVLFIATVGIFMYFYGGMDLEFMAYHLLSGSLVFAGVFMVTDYPTAGLTRIGQIVFPIGAGLLVGLFRTQGFAPEGVGLAIVTMNAVIPYVDRLAFNKVYGHTDRPFLGMGYNDREPFKKVDPLAER

SEQ ID NO: 6307 - DNA, 1401 bp, Alloiococcus otitidis
  CDS (73)..(1398)
gtagaatttataagcgttttccttaaaattataagactattgagaatgactataataaaggaggatttgggtatggctgagagtcgatttgttttaaagggttatcatggggggacctttttagaaggcaacagggatagaagcatagaccaggctatcacaaaggcccaggcaccagggattttagtctttccaatgaccatgcatattggccaagcagctaagccagttgttaaggttggtgattcggttaagattggtagtcttctgggccaagcccagggacatgtgtcagccaacattcattcatcggtctccggtcaagttatttcggtcgaaaaccgtatgctcaatggaaggcagttggagtgtgtcattgtcaagaatgattatcaggatgaccaggctccggccttaactggttatggggaggaccttgaaccagaaacaattatagacttaatccgccaggctggtatcgccgggatgggaggcgccgagtttccgacggcagttaaattgatccaagacgaaggcgaaaaaatcaaccacttgattgtcaacggggccgagtgtgagccctatgctacatctgactaccggactatcctcgaaaagagcgagcaaatcctggaagggatccgcttacttgaccaggtttttgaagtcaagaccatcaccattaccttggaaaaggatatggctcaagctggccaagccttagaaaagcaaatagcccagactggctatagtaaatgtcaggtgaaactcctgccaacccagtatccccaaggggctgaacggaaattgattgaagtctgcaagggacttcaagtcccctcaggtggcctacctaaagatgtgggttgcctggtctcaaatgttgggaccctggtggccatctaccaggccgtccgtctgggtaagcccttaactgaaagggtggtcaccgttacagggagtcccattaaggaagccaaaaacctcttggttcggattggaacaccggtggatgacttgatcgaccagtgtggcggttttgaccaagctccacgcaaggtgctcttaggcggcccgatgatgggtcaagctattaatgacgggggcattccaatttccaaagggacaacccatgtaaccttcctggcggctgatgaagtcgaccagcggaaccggatggattgtatccggtgtgctgagtgcctgaatgtttgcccagtcggtttacaacctattttaatcagcaatgcatatgaaagaggggatatccaggcagcccaggaattaggggccttggactgtattgaatgtggtaactgctcttatatctgcccatcccacatccctctcttggaaaatatccgtaaggccaaagtgaccatccgggaaagagagggataa

SEQ ID NO: 6308 - protein, 442 aa, Alloiococcus otitidis
MAESRFVLKGYHGGTFLEGNRDRSIDQAITKAQAPGILVFPMTMHIGQAAKPVVKVGDSVKIGSLLGQAQGHVSANIHSSVSGQVISVENRMLNGRQLECVIVKNDYQDDQAPALTGYGEDLEPETIIDLIRQAGIAGMGGAEFPTAVKLIQDEGEKINHLIVNGAECEPYATSDYRTILEKSEQILEGIRLLDQVFEVKTITITLEKDMAQAGQALEKQIAQTGYSKCQVKLLPTQYPQGAERKLIEVCKGLQVPSGGLPKDVGCLVSNVGTLVAIYQAVRLGKPLTERVVTVTGSPIKEAKNLLVRIGTPVDDLIDQCGGFDQAPRKVLLGGPMMGQAINDGGIPISKGTTHVTFLAADEVDQRNRMDCIRCAECLNVCPVGLQPILISNAYERGDIQAAQELGALDCIECGNCSYICPSHIPLLENIRKAKVTIREREG

SEQ ID NO: 6309 - DNA, 1401 bp, Alloiococcus otitidis; identical to SEQ ID NO: 6307
  CDS (46)..(1398)

SEQ ID NO: 6310 - protein, 451 aa, Alloiococcus otitidis
MTIIKEDLGMAESRFVLKGYHGGTFLEGNRDRSIDQAITKAQAPGILVFPMTMHIGQAAKPVVKVGDSVKIGSLLGQAQGHVSANIHSSVSGQVISVENRMLNGRQLECVIVKNDYQDDQAPALTGYGEDLEPETIIDLIRQAGIAGMGGAEFPTAVKLIQDEGEKINHLIVNGAECEPYATSDYRTILEKSEQILEGIRLLDQVFEVKTITITLEKDMAQAGQALEKQIAQTGYSKCQVKLLPTQYPQGAERKLIEVCKGLQVPSGGLPKDVGCLVSNVGTLVAIYQAVRLGKPLTERVVTVTGSPIKEAKNLLVRIGTPVDDLIDQCGGFDQAPRKVLLGGPMMGQAINDGGIPISKGTTHVTFLAADEVDQRNRMDCIRCAECLNVCPVGLQPILISNAYERGDIQAAQELGALDCIECGNCSYICPSHIPLLENIRKAKVTIREREG

SEQ ID NO: 6311 - DNA, 1401 bp, Alloiococcus otitidis; identical to SEQ ID NO: 6307
  CDS (40)..(1398)

SEQ ID NO: 6312 - protein, 453 aa, Alloiococcus otitidis
MRMTIIKEDLGMAESRFVLKGYHGGTFLEGNRDRSIDQAITKAQAPGILVFPMTMHIGQAAKPVVKVGDSVKIGSLLGQAQGHVSANIHSSVSGQVISVENRMLNGRQLECVIVKNDYQDDQAPALTGYGEDLEPETIIDLIRQAGIAGMGGAEFPTAVKLIQDEGEKINHLIVNGAECEPYATSDYRTILEKSEQILEGIRLLDQVFEVKTITITLEKDMAQAGQALEKQIAQTGYSKCQVKLLPTQYPQGAERKLIEVCKGLQVPSGGLPKDVGCLVSNVGTLVAIYQAVRLGKPLTERVVTVTGSPIKEAKNLLVRIGTPVDDLIDQCGGFDQAPRKVLLGGPMMGQAINDGGIPISKGTTHVTFLAADEVDQRNRMDCIRCAECLNVCPVGLQPILISNAYERGDIQAAQELGALDCIECGNCSYICPSHIPLLENIRKAKVTIREREG

SEQ ID NO: 6313 - DNA, 294 bp, Alloiococcus otitidis
  CDS (100)..(291)
accaggagcagaattaacctggatgcggcaagtccactattacatgggtctatacccttacacctattcagcaggactcacttagctacccaggccttcttgaaaatcaaagaaggcgacattgatgtttcggcctggctagacttcttgaagctcggtgggactaaaaaaccgatcgaagcgggtaaggtagctggcgttgacctcgacactgaaaaaccactggcggacaccatccattacttagaccaagcagtggaccggatgattgctttaagccaggaaatcgaatag

SEQ ID NO: 6314 - protein, 64 aa, Alloiococcus otitidis
MKIKEGDIDVSAWLDFLKLGGTKKPIEAGKVAGVDLDTEKPLADTIHYLDQAVDRMIALSQEIE

SEQ ID NO: 6315 - DNA, 1623 bp, Alloiococcus otitidis
  CDS (31)..(1620)
actaccaaaaagaatattaaggagatcgttatgtcagataaattattcaaaagatctgaagtagaccctggtctgaagtgggatcttacttcattatttcaaacggaagcagattttgacctggctctggaagaactcgtcaaggacgttgaccaatttgtccaaaaataccaaggaaagctaaaggacccagagggtgtcttgacctcagttaaagatttagaggatatcgtagcccgcttgcaagacatccaccaatactcttacctacctgtatctgttgacatcaccgacagcttggccaaggaccggtcccaaaaaacctcttcaattgttgctcaagtatcgactaaactgagtttttacaattcagagttgactcgcctggatgaccaagtcttaagaaaagtggcagatttagatcacaactaccaaacctttgtggagaatatcattaaactgaaacaacaccaactccacccgaaagtagaagaaactttggctagcttaagccctgttttaaattctttcgaagaaatctatgaacaggcccggtctgctgatgcagattatggctccttcctagcccaaggtcgggaataccccctaaactttgtctcctacgaggaagtttatgcctacgatgaatctcaagaagttagacggaagtcctatgaccagtttaataaggttttgggccagtataaaaatacggttgcaaccaattactacaaccatgtcttaagagacaagattatggcaaacctccgtggctttgatacagtctttgactacctcttagacgaccaagatgtaaatcaagacctctaccaccggcaaattgacatgttaatggaagactttgcccctgtcatgcgcaagtacatcacccatgtcaaagaagtcaacggcttggacaagatgacctatgccgacttgaagatggacttggacccggattacaccgaacgcttaaccgtagacgagtcaagggacttggttaagcaagcaacccaagttctgggtcaagactatgtggctataatggaccaagcttatgaagaccggtggattgactttgcttccaatattggtaagcggtccggggccttctgctcccaagcctatgcctcccacccctacattatgttgtcctggtcaggtatcttaagtgacgcttacaccctaatccacgagttgggccatgctggacagggctacttggcagcccaaaatcaagtccagaccgcctttagaccctccacttacttaattgaggcaccgtccacctttaatgaattgctcctgtcagactacttgcgcaaggaggcaactagcccgagagcagagcggtccattatctccaaaatgatctccaagacctactaccacaactttgtcacccatctcttggaagcggcctaccaaagggaagtctaccggttaattgaccaaggcaagggctttgatgctgacaagttaagtcaaattaaaagacaggtcttagaagacttctggggcgatgctgtggaaattgaaccaggagcagaattaacctggatgcggcaagtccactattacatgggtctatacccttacacctattcagcaggactcacttag

SEQ ID NO: 6316 - protein, 530 aa, Alloiococcus otitidis
MSDKLFKRSEVDPGLKWDLTSLFQTEADFDLALEELVKDVDQFVQKYQGKLKDPEGVLTSVKDLEDIVARLQDIHQYSYLPVSVDITDSLAKDRSQKTSSIVAQVSTKLSFYNSELTRLDDQVLRKVADLDHNYQTFVENIIKLKQHQLHPKVEETLASLSPVLNSFEEIYEQARSADADYGSFLAQGREYPLNFVSYEEVYAYDESQEVRRKSYDQFNKVLGQYKNTVATNYYNHVLRDKIMANLRGFDTVFDYLLDDQDVNQDLYHRQIDMLMEDFAPVMRKYITHVKEVNGLDKMTYADLKMDLDPDYTERLTVDESRDLVKQATQVLGQDYVAIMDQAYEDRWIDFASNIGKRSGAFCSQAYASHPYIMLSWSGILSDAYTLIHELGHAGQGYLAAQNQVQTAFRPSTYLIEAPSTFNELLLSDYLRKEATSPRAERSIISKMISKTYYHNFVTHLLEAAYQREVYRLIDQGKGFDADKLSQIKRQVLEDFWGDAVEIEPGAELTWMRQVHYYMGLYPYTYSAGLT

SEQ ID NO: 6317 - DNA, 1002 bp, Alloiococcus otitidis
  CDS (328)..(999)
gcaatagcaaaaaatgtgacaatatgtcataatataaaaaaggaggttttaaagctgactaagcaaattttagtattggttgactatagtcagacctacctggacagaatccaggacctagcccaggattatgacctaatccagaccttggaagaagccgatttttctcaggttgagattgtcttgggatgggattcggacctggaagatgtgattgcccagggcgaccactcaatcaagtggatccaagccaagtccgctggggttgactacctgcccttggacttattagcagaccagggaatcatcttaacgtctgcttccggcatgcatgctcaagccattacggagaccgtttttgccatgattttgggctactcgcgccaagttttccaatcccgccactatcaagcaaacaagtattggggccaagaggatgttgacctttttgaactgaaagggaagactttggctgtggtcggcctaggcaatattggcccaaaagtggctgacattgccaaggcatttggcttaaaagtggtcggtgtgaaccggtcagggactacagatgccccggttgatgccatctacccggcagaccagattaactttgccttaggccaggcagatatagtggtcaatatcctgcccttaaccgaccaaactagaggcctttacaatgcggaccgcttccaggcctttaaggaccagtctgtctttatcaatgtggggcggggccccagtgtggtcacagaagatttggtggcagctttaaatgaaaggaaaatcgccttttgcggtttggatgtttttgaagaagagcctttaccggaaaccagtcccctatgggagatggataatgtcctcatcaccccccatattgctggcgaaatggctgactacaatgctcatttgttccctattattgaagcaaacttgtcctcttatatcaaccagcaggatgtggccctcaacaaaatagactaccaaaaagaatattaa

SEQ ID NO: 6318 - protein, 224 aa, Alloiococcus otitidis
MHAQAITETVFAMILGYSRQVFQSRHYQANKYWGQEDVDLFELKGKTLAVVGLGNIGPKVADIAKAFGLKVVGVNRSGTTDAPVDAIYPADQINFALGQADIVVNILPLTDQTRGLYNADRFQAFKDQSVFINVGRGPSVVTEDLVAALNERKIAFCGLDVFEEEPLPETSPLWEMDNVLITPHIAGEMADYNAHLFPIIEANLSSYINQQDVALNKIDYQKEY

SEQ ID NO: 6319 - DNA, 1002 bp, Alloiococcus otitidis; identical to SEQ ID NO: 6317
  CDS (76)..(999)

SEQ ID NO: 6320 - protein, 308 aa, Alloiococcus otitidis
MVDYSQTYLDRIQDLAQDYDLIQTLEEADFSQVEIVLGWDSDLEDVIAQGDHSIKWIQAKSAGVDYLPLDLLADQGIILTSASGMHAQAITETVFAMILGYSRQVFQSRHYQANKYWGQEDVDLFELKGKTLAVVGLGNIGPKVADIAKAFGLKVVGVNRSGTTDAPVDAIYPADQINFALGQADIVVNILPLTDQTRGLYNADRFQAFKDQSVFINVGRGPSVVTEDLVAALNERKIAFCGLDVFEEEPLPETSPLWEMDNVLITPHIAGEMADYNAHLFPIIEANLSSYINQQDVALNKIDYQKEY

SEQ ID NO: 6321 - DNA, 1002 bp, Alloiococcus otitidis; identical to SEQ ID NO: 6317
  CDS (16)..(999)

SEQ ID NO: 6322 - protein, 328 aa, Alloiococcus otitidis
MTICHNIKKEVLKLTKQILVLVDYSQTYLDRIQDLAQDYDLIQTLEEADFSQVEIVLGWDSDLEDVIAQGDHSIKWIQAKSAGVDYLPLDLLADQGIILTSASGMHAQAITETVFAMILGYSRQVFQSRHYQANKYWGQEDVDLFELKGKTLAVVGLGNIGPKVADIAKAFGLKVVGVNRSGTTDAPVDAIYPADQINFALGQADIVVNILPLTDQTRGLYNADRFQAFKDQSVFINVGRGPSVVTEDLVAALNERKIAFCGLDVFEEEPLPETSPLWEMDNVLITPHIAGEMADYNAHLFPIIEANLSSYINQQDVALNKIDYQKEY

SEQ ID NO: 6323 - DNA, 504 bp, Alloiococcus otitidis
  CDS (16)..(501)
aagttacaaagaataatggaggttatgcgtatgtcagaagacaaagatcaattagaaccaagaggaagtcagcccaaacaccagatccaagcccatgaaaaaggccagaataagtggcaagtttacgatatcctttacttaatctctggcattgtgggcattattgctccctttttaccctttgcccaagtctcggcttttggtttctccgagtccacaagcctaatggtcgctaacggcaatattggagacggcattttttacattatcttatttattatcggacttgtcctcttcttttttaagaaaaagttggggatgctgatcgttgcaatcataacaactctttttggagtaatcactttcggtctgtatatctacagcatgagccaagctggacggttaagtaattgggttaacctacaaattggcgcctacctcctactcctatccatcatcgttttcttggtttcagctttcttatcctacaaaaaccgagcttaa

SEQ ID NO: 6324 - protein, 162 aa, Alloiococcus otitidis
MEVMRMSEDKDQLEPRGSQPKHQIQAHEKGQNKWQVYDILYLISGIVGIIAPFLPFAQVSAFGFSESTSLMVANGNIGDGIFYIILFIIGLVLFFFKKKLGMLIVAIITTLFGVITFGLYIYSMSQAGRLSNWVNLQIGAYLLLLSIIVFLVSAFLSYKNRA

SEQ ID NO: 6325 - DNA, 717 bp, Alloiococcus otitidis
  CDS (13)..(714)
ggaggccatttgatgaaaaagtacttatacctattgactgtgccctttttattaactgcttgctttaacgatgaccaagccaaagcaccggaagctgaagacccggttgtagaagaagagagccaagaagcaagtcaaaactccgcggacgaccagtctaatgaggaccagcctggtgaccaagttagtgatgataatgaagaccaggaagacaacggtcaagaggactctgaccaaaaagagtctgacccagactcaagtgacggccaagacagtcaggatggcggaggagatgaccaagcccaagctggagacgaccaggatcaagaatcccagtcagggagtggtggccaagttgcctctacttctaaccaacctggtcaaggccgaaattcaagtgagtcggcttcatctagccaaattggtcaaaacaaacaagctgaagcagatcctaaccaggacggacaaggagaggttagccaagaccaggctgaccagtcgattgaagcagtccaaccctacttggacggtaataccgacaactacctctacttaacccacttagaagaagatggtcagtggttgcaggtagaagttcgagaaaacatgccgggccaagaccatactaacctggtggcccttttccgtcgcaaccttgaaagcggggaaatcgaggcctttgacttcattacaggagtctaccaagccgtcgaataa

SEQ ID NO: 6326 - protein, 234 aa, Alloiococcus otitidis
MKKYLYLLTVPFLLTACFNDDQAKAPEAEDPVVEEESQEASQNSADDQSNEDQPGDQVSDDNEDQEDNGQEDSDQKESDPDSSDGQDSQDGGGDDQAQAGDDQDQESQSGSGGQVASTSNQPGQGRNSSESASSSQIGQNKQAEADPNQDGQGEVSQDQADQSIEAVQPYLDGNTDNYLYLTHLEEDGQWLQVEVRENMPGQDHTNLVALFRRNLESGEIEAFDFITGVYQAVE

SEQ ID NO: 6327 - DNA, 717 bp, Alloiococcus otitidis; identical to SEQ ID NO: 6325
  CDS (10)..(714)

SEQ ID NO: 6328 - protein, 235 aa, Alloiococcus otitidis
MMKKYLYLLTVPFLLTACFNDDQAKAPEAEDPVVEEESQEASQNSADDQSNEDQPGDQVSDDNEDQEDNGQEDSDQKESDPDSSDGQDSQDGGGDDQAQAGDDQDQESQSGSGGQVASTSNQPGQGRNSSESASSSQIGQNKQAEADPNQDGQGEVSQDQADQSIEAVQPYLDGNTDNYLYLTHLEEDGQWLQVEVRENMPGQDHTNLVALFRRNLESGEIEAFDFITGVYQAVE

SEQ ID NO: 6329 - DNA, 915 bp, Alloiococcus otitidis
  CDS (121)..(912)
ggcgtggccaagcccagtcaagaccaagcagaagttaaaatccaaagaagttttaagggaccagatgaccatgccggccagctctacctcgttcccacccctattggtaacttagacgacatgaccttccgggcggtagcaaccctgaagtcggtggacttcattgcagctgaagatacccggcatacccaaaagttgctcaaccattttggcatcgacaccaaaaagataagcttccacgaacacaatacccaatccaggctggctgaattggtggacatcctccaatctggccagtccattgcccaagtctcagatgccggtatgccttccatcagcgacccaggcatggaattggtccaggccgcccttgaccaaggcatatcggtgatccccttgccgggggccaatgccgggctgactgccttaattgcttctggcatcccgccacaacccttctactttcatggttttttgcccaggggtaagtcgcaaatgaaagattgtttacaagacctggtaaacaaaagggagaccctggtcttttatgagtctccccaccggctcaaaaaatgcctcaaggccatgaaccaggtctttggtcccaaccgttacctggttttaggccgggagctgaccaaggagtacgaagaatttattcggggagagctaaaagaaatattaaattacctggaaaccgtcccattgcggggagaatttgttataatagtagcaggtaatgacaatccacaaagccaggatcaacaggactggcaggcttattcccttgaagaccatgtggccaagctcatggcagaccaagatttatccagcaaggctgctattaaagaggtagccaagattcgccagatttccaagcggcaggtttacgctgcctaccacgacctagactga

SEQ ID NO: 6330 - protein, 264 aa, Alloiococcus otitidis
MTFRAVATLKSVDFIAAEDTRHTQKLLNHFGIDTKKISFHEHNTQSRLAELVDILQSGQSIAQVSDAGMPSISDPGMELVQAALDQGISVIPLPGANAGLTALIASGIPPQPFYFHGFLPRGKSQMKDCLQDLVNKRETLVFYESPHRLKKCLKAMNQVFGPNRYLVLGRELTKEYEEFIRGELKEILNYLETVPLRGEFVIIVAGNDNPQSQDQQDWQAYSLEDHVAKLMADQDLSSKAAIKEVAKIRQISKRQVYAAYHDLD

SEQ ID NO: 6331 - DNA, 915 bp, Alloiococcus otitidis; identical to SEQ ID NO: 6329
  CDS (4)..(912)

SEQ ID NO: 6332 - protein, 303 aa, Alloiococcus otitidis
MAKPSQDQAEVKIQRSFKGPDDHAGQLYLVPTPIGNLDDMTFRAVATLKSVDFIAAEDTRHTQKLLNHFGIDTKKISFHEHNTQSRLAELVDILQSGQSIAQVSDAGMPSISDPGMELVQAALDQGISVIPLPGANAGLTALIASGIPPQPFYFHGFLPRGKSQMKDCLQDLVNKRETLVFYESPHRLKKCLKAMNQVFGPNRYLVLGRELTKEYEEFIRGELKEILNYLETVPLRGEFVIIVAGNDNPQSQDQQDWQAYSLEDHVAKLMADQDLSSKAAIKEVAKIRQISKRQVYAAYHDLD

SEQ ID NO: 6333 - DNA, 318 bp, Alloiococcus otitidis
  CDS (7)..(315)
agggaaatggttaaaagttatttttatgtcctcttatgcaaagatgacagcttgtatgggggctatactacaaacttaagccgccgcttgagtcagcatagtgctggggtgggggccaagtatactaggccccagtctaggcgaccagtcaagctcctttttgcccaggcctacccttctaagagtttagccatgcaagcagagtatgcctttaagcaactcacccggcctaaaaaggaagcttttttgggtcaaaaaggggtaaagcttccctttgaccgaaggcggaagagtgttatcagagatgaggaggaataa

SEQ ID NO: 6334 - protein, 103 aa, Alloiococcus otitidis
MVKSYFYVLLCKDDSLYGGYTTNLSRRLSQHSAGVGAKYTRPQSRRPVKLLFAQAYPSKSLAMQAEYAFKQLTRPKKEAFLGQKGVKLPFDRRRKSVIRDEEE

SEQ ID NO: 6335 - DNA, 894 bp, Alloiococcus otitidis
  CDS (139)..(891)
ccgagaccaaaaacaagattaaagctagctgggtccggtcataatcggcttcaagtgcctggattcaccaataaacgagtccccggtagacctggtaaaaaggcaagggggagaagtgcagagctaggaggaagacagatgacaagtgacattccattaaaagctggcgagcaagtggacctcttgtatccaagtcggcgtcaaattattcaaagcagggatactttttcctattctgttgatgccatcctcctagcccactttgcaaagctgcccaagtctagacatgccaagctcttagacctctgtgcggggaacggtgcccttaccctccttttagccgaccaaacttctgccaagcttgtaggggttgagatccaggaaaaactcgttgacatggccaggcggtcagccagtttaaatggcttaagtgaccgggttgacttccttcaagctgacctggtggattacagccagcaagtcccagctgctagcattgactgcctgacctgcaatccgccttactttcagtcaagcaagaccaggcaaaataagctggcagcctatgcccaagcccggcatgagctaagtttaaacctggctagcttgcttgaggcggtggcccgactcttgaagaacaagggtcttgcctacctggtttataggacggaccgactcgtcgaattgatcgaccagtccttgacttataggctagtcccaaaacaaatccagctggtttaccctaaggtcaataaatcatccaagttctttttagtgaaactgatcaaagagggatctaaagctggctttcagatggactcacctttttatattatggacgacaaaagcaagtataccgaccaaatgatccaggtgttaaagggaaatggttaa

SEQ ID NO: 6336 - protein, 251 aa, Alloiococcus otitidis
MTSDIPLKAGEQVDLLYPSRRQIIQSRDTFSYSVDAILLAHFAKLPKSRHAKLLDLCAGNGALTLLLADQTSAKLVGVEIQEKLVDMARRSASLNGLSDRVDFLQADLVDYSQQVPAASIDCLTCNPPYFQSSKTRQNKLAAYAQARHELSLNLASLLEAVARLLKNKGLAYLVYRTDRLVELIDQSLTYRLVPKQIQLVYPKVNKSSKFFLVKLIKEGSKAGFQMDSPFYIMDDKSKYTDQMIQVLKGNG

SEQ ID NO: 6337 - DNA, 894 bp, Alloiococcus otitidis; identical to SEQ ID NO: 6335
  CDS (55)..(891)

SEQ ID NO: 6338 - protein, 279 aa, Alloiococcus otitidis
MPGFTNKRVPGRPGKKARGRSAELGGRQMTSDIPLKAGEQVDLLYPSRRQIIQSRDTFSYSVDAILLAHFAKLPKSRHAKLLDLCAGNGALTLLLADQTSAKLVGVEIQEKLVDMARRSASLNGLSDRVDFLQADLVDYSQQVPAASIDCLTCNPPYFQSSKTRQNKLAAYAQARHELSLNLASLLEAVARLLKNKGLAYLVYRTDRLVELIDQSLTYRLVPKQIQLVYPKVNKSSKFFLVKLIKEGSKAGFQMDSPFYIMDDKSKYTDQMIQVLKGNG

SEQ ID NO: 6339 - DNA, 390 bp, Alloiococcus otitidis
  CDS (4)..(387)
cttatggataaaaaagacctatatgataccatcctcaatttagagaaccaggccaaagacttggctgaccaattagctggtattaaagaagaagtgtccgaaatgacccaagaaaaccacaccctccggatggaaaaccaatacctgagggaccgactggattcggaattaagccaaaaaaaccctgacagccaagagccggaccaagttccaccggctgaccccaacaacccctctggtttaaccaagtcccggttaaacttggaaaatatttatgaagatggcttccatgtctgcaacctcttttttggcaaacgccgggagggggactccccttgtgctttttgcctggaagttatttacggtgaccgagaccaaaaacaagattaa

SEQ ID NO: 6340 - protein, 128 aa, Alloiococcus otitidis
MDKKDLYDTILNLENQAKDLADQLAGIKEEVSEMTQENHTLRMENQYLRDRLDSELSQKNPDSQEPDQVPPADPNNPSGLTKSRLNLENIYEDGFHVCNLFFGKRREGDSPCAFCLEVIYGDRDQKQD

SEQ ID NO: 6341 - DNA, 1026 bp, Alloiococcus otitidis
  CDS (34)..(1023)
acagttttaatccagttagccacaaggtgggatatgatggacttagcagaaaaacaagcaggggtctaccaactttttgaccgaatcctggccaaccatgccctcaagcatgcctatctttttgaaggtttggccggatcaggcaaactggagatgagccggtatattgccaagagactgttttgccccaaccaagaccagggacaagcttgccaagtttgtcccacttgcttgcgcattgaccagggtcaacaccctgatgtggtagaaatagcccctgaggggaagggacggtcgattagggtagaccgggtacgacaggtcaaggatgccctaagcaagtctggtgtggagagtcaaaagaaaatgattatccttaaccaggctgataaaatgacccccagtgcagccaacagcctgcttaaatttctggaagagccggcaggggatgtgactattttcttgttagttactagccggcaaaaccttttgccaactattgtttcccgctgccaggttatccagtttgccaagcaggatttaaagactcggattgaggacttagtggaagccggtttgtcccaggaagaagcccacttggccagccacctcagccaagacttagacttggctaagtccctcattgaggaagaggacttgctggcagtcagtcaaaaaatttggcagtggtttagctatctcatgaaccaagatgacttggcctttatcctagtccaaagagacttaatggcctttatccaagaccgggatgactgccagatggtttgtgacttaatcctctacctcttccaagacctgctccacttacactaccatttagatagtccggcctgcttcgcaggccacgaaagtgacctccgctactttatggacctgctttcgatcaagcaagtgtcttatgccatgcaagccaccctgcaagctaaaagagaagtggaccacaatgtggccagtcaggctgttttagaaggcttgactttggacttgcaggaaagtataggctaa

SEQ ID NO: 6342 - protein, 330 aa, Alloiococcus otitidis
MMDLAEKQAGVYQLFDRILANHALKHAYLFEGLAGSGKLEMSRYIAKRLFCPNQDQGQACQVCPTCLRIDQGQHPDVVEIAPEGKGRSIRVDRVRQVKDALSKSGVESQKKMIILNQADKMTPSAANSLLKFLEEPAGDVTIFLLVTSRQNLLPTIVSRCQVIQFAKQDLKTRIEDLVEAGLSQEEAHLASHLSQDLDLAKSLIEEEDLLAVSQKIWQWFSYLMNQDDLAFILVQRDLMAFIQDRDDCQMVCDLILYLFQDLLHLHYHLDSPACFAGHESDLRYFMDLLSIKQVSYAMQATLQAKREVDHNVASQAVLEGLTLDLQESIG

SEQ ID NO: 6343 - DNA, 342 bp, Alloiococcus otitidis
  CDS (13)..(339)
ggaggaagcaaaatgaaacttgtcgtagccattgtccaaaaccaagacagtaaacgtttatcagaccaatttgtagaaaatggtgtccgggctaccaaattatcatcgactggtggttttttacgagcagggaacacaacatttatcgttggtgcagatgacgaccgcattgattttgtcttaaatatcatccaagaaaattgttcaacccgggaacaaaagatggtcaacccaccttcttatgactttaccctagaatcggacctatccttcccaatcgatgtcgaagtgggaggggcgacagtctttgtcctcccaattgaccaatttgaacagttttaa

SEQ ID NO: 6344 - protein, 109 aa, Alloiococcus otitidis
MKLVVAIVQNQDSKRLSDQFVENGVRATKLSSTGGFLRAGNTTFIVGADDDRIDFVLNIIQENCSTREQKMVNPPSYDFTLESDLSFPIDVEVGGATVFVLPIDQFEQF

SEQ ID NO: 6345 - DNA, 654 bp, Alloiococcus otitidis
  CDS (10)..(651)
gagaataagatgccagggatttttattagcctagaggggccagatgggtcaggcaagtccagcttgatccaagtgcttgtgccgaagatcagggaatacttcaataaagaggttgtccagacccgggaaccgggtggcagtccattggcggaagaaatacgccagctgatcttagataccagccatcaggaaatggatcccaagacagaggcactactaatggctgcttcccgccgtcagcacctggtagaaactatcctgcccaagttggagtccggagcggtggttgtatcggaccgctatgtggactcttccttggcctatcagggagcaggacgccagttgggcctggaggcagtttggtccatcaaccattttgccatccagtcggttatgccagaccttaccctctatttggacatcgatgcccaggtgggactcaaccggatcgcccccaaaaatgccagagggggcagggaccgcttggagttggaggacattcacttccataaccgggtccgtcaaggctaccatactttaattgcccatgaccctaaccgctttattgttattgacgctagccaagaatttaaccaggtggccgacatagcctggcaggcagtaagggaaggacttgcagaattgggaaattaa

SEQ ID NO: 6346 - protein, 214 aa, Alloiococcus otitidis
MPGIFISLEGPDGSGKSSLIQVLVPKIREYFNKEVVQTREPGGSPLAEEIRQLILDTSHQEMDPKTEALLMAASRRQHLVETILPKLESGAVVVSDRYVDSSLAYQGAGRQLGLEAVWSINHFAIQSVMPDLTLYLDIDAQVGLNRIAPKNARGGRDRLELEDIHFHNRVRQGYHTLIAHDPNRFIVIDASQEFNQVADIAWQAVREGLAELGN

SEQ ID NO: 6347 - DNA, 690 bp, Alloiococcus otitidis
  CDS (124)..(687)
agaagttactatgaaggcaagttcggaagtatcagagtggtgaaccactctgattttcaacgtttaaggaaagttgatagagaaggtgacttgatgcagtacccccaacccattgcccgcttgatggacagttatatgaaactacccggaatcggtgagaaaaccgcggcacgcttggccttttacaccgtcaagatgcgggaagaggacgtgactgactttgccaaggccttgattagcgtccagcgtgacctgacctactgttccatttgtggcaatatgaccgaagaggacccttgcagtatttgcagtgatgacagccgggaccagtccactattttagtggtcgagcaggcccgggatgtcctctccatggaaaagatgtctgaatacaaggggctttaccatgtcctccacggcatcttgtccccggtagaagggacgggtccggaagacattaatattgccgacttgattaaaagactccaggaaaatgaagttgaagaagtcattatcgctaccaatgctacagccgaaggggaggcgaccgctatgtacctgtcccgcttgatcaaaccttctggcatcaaggtgacccggctagcccatggactgtcggttggtagtgatattgaatatgctgatgaaatcaccttgctcaaggcggttgaaggcagacgagagatgtag

SEQ ID NO: 6348 - protein, 188 aa, Alloiococcus otitidis
MDSYMKLPGIGEKTAARLAFYTVKMREEDVTDFAKALISVQRDLTYCSICGNMTEEDPCSICSDDSRDQSTILVVEQARDVLSMEKMSEYKGLYHVLHGILSPVEGTGPEDINIADLIKRLQENEVEEVIIATNATAEGEATAMYLSRLIKPSGIKVTRLAHGLSVGSDIEYADEITLLKAVEGRREM

SEQ ID NO: 6349 - DNA, 690 bp, Alloiococcus otitidis; identical to SEQ ID NO: 6347
  CDS (94)..(687)

SEQ ID NO: 6350 - protein, 198 aa, Alloiococcus otitidis
MQYPQPIARLMDSYMKLPGIGEKTAARLAFYTVKMREEDVTDFAKALISVQRDLTYCSICGNMTEEDPCSICSDDSRDQSTILVVEQARDVLSMEKMSEYKGLYHVLHGILSPVEGTGPEDINIADLIKRLQENEVEEVIIATNATAEGEATAMYLSRLIKPSGIKVTRLAHGLSVGSDIEYADEITLLKAVEGRREM

SEQ ID NO: 6351 - DNA, 690 bp, Alloiococcus otitidis; identical to SEQ ID NO: 6347
  CDS (91)..(687)

SEQ ID NO: 6352 - protein, 199 aa, Alloiococcus otitidis
MMQYPQPIARLMDSYMKLPGIGEKTAARLAFYTVKMREEDVTDFAKALISVQRDLTYCSICGNMTEEDPCSICSDDSRDQSTILVVEQARDVLSMEKMSEYKGLYHVLHGILSPVEGTGPEDINIADLIKRLQENEVEEVIIATNATAEGEATAMYLSRLIKPSGIKVTRLAHGLSVGSDIEYADEITLLKAVEGRREM

SEQ ID NO: 6353 - DNA, 690 bp, Alloiococcus otitidis; identical to SEQ ID NO: 6347
  CDS (37)..(687)

SEQ ID NO: 6354 - protein, 217 aa, Alloiococcus otitidis
MVNHSDFQRLRKVDREGDLMQYPQPIARLMDSYMKLPGIGEKTAARLAFYTVKMREEDVTDFAKALISVQRDLTYCSICGNMTEEDPCSICSDDSRDQSTILVVEQARDVLSMEKMSEYKGLYHVLHGILSPVEGTGPEDINIADLIKRLQENEVEEVIIATNATAEGEATAMYLSRLIKPSGIKVTRLAHGLSVGSDIEYADEITLLKAVEGRREM

SEQ ID NO: 6355 - DNA, 360 bp, Alloiococcus otitidis
  CDS (49)..(357)
agacaatattacaatcaaagattaaggagtttatgcaatatgcgtggaatgggaaatatgcaaggcatgatgaagaagatgaagaagatgcaaaaggagatggaagaagctcagacaaagttgaacgaaagccaatttactggttcagctaacaatgacttggtccaagtcaccttaaatggggaaaagaaggtccaagctgtgaccattaaagaagagattgtggacccggaggacaaggaaatcattgaggacttagtccagctagccatgaacgatgccttggacaaggtggaccaggaaactgaacgtgtcatgggcaagtacaccaaaggattaggcggtttaccaggcttttaa

SEQ ID NO: 6356 - protein, 103 aa, Alloiococcus otitidis
MGNMQGMMKKMKKMQKEMEEAQTKLNESQFTGSANNDLVQVTLNGEKKVQAVTIKEEIVDPEDKEIIEDLVQLAMNDALDKVDQETERVMGKYTKGLGGLPGF

SEQ ID NO: 6357 - DNA, 360 bp, Alloiococcus otitidis; identical to SEQ ID NO: 6355
  CDS (40)..(357)

SEQ ID NO: 6358 - protein, 106 aa, Alloiococcus otitidis
MRGMGNMQGMMKKMKKMQKEMEEAQTKLNESQFTGSANNDLVQVTLNGEKKVQAVTIKEEIVDPEDKEIIEDLVQLAMNDALDKVDQETERVMGKYTKGLGGLPGF

SEQ ID NO: 6359 - DNA, 1785 bp, Alloiococcus otitidis
  CDS (13)..(1782)
gaggggagagctatgacccaccaggccttataccgggtatggcgaccgcaaagttttgctgatgtatccggccagcatgtggtcaccaagaccctaaagaatgccattaaaaatgataataccagtcatgcctacctgtttactggaccccgggggacgggcaagaccagtgtggcaaaaatatttgccaaggccattaattgcccctactcggatgatggggagccttgtaatgaatgtcagatttgccaggagatcacccagggtagtctaggcgatgtcatcgaaatcgatgcggccagcaataatggggtggaagagattcgcgatattagggaaaaggctaattatgccccaacttcggccgtttacaaggtctacattatcgatgaggtccatatgttatcctctggggcctttaacgccctcttgaaaacactggaagagcctccagccaatgtggtctttatcttagcaacgactgaaccccacaagattccggctaccattatctcccggacccagcgttttgattttaagcggattgacaaccaggacatcatcgaccgcttgatttatatcttagaagaagaccaggtcccctacagcaaagaagccgtcctaagcctagccaatgcagcggaaggtgggatgcgggatgccttgagtatgttggaccaggccttaagctttatgacagatgagttaacagaagaagttgccctccagattacagggagcattacccagtctctcttgcttgaatacttgcaggtgattagccaaggtcagacggaagaaggactcaagctcttgcaagaagttttaggggaaggcaaggaccctagccggtttgtggaagacgctattatgatgacccgggacctcttgctttaccaaactagccaaggcgataattttgttcctaaattggctcgcttagacgaccagtttgaagacctggcgaaggacttggacaaggagatggcctaccatattattgatgtcttaaaccaaacccaagacgatctccgcctaagcaaccatggggaagtctatttggaaatagccacggtcaagcttagccagccttcttcagccgttcagaccatccaggccagccaagtcaacatggtggaccaggataataaagaagagattgcccaactgcaaaaccaggtcaagtccctccagcaaagtattcaaaacttgcaagctggagccaaacaagggcctaagcaaagagctaagtcaaaagctggccccaagcaatctggccctggcaagtctagaagccaccgtcaccagcaaggcttcaaggttaaccggaaagccgtttactctatcttggaccaggcgacccgtaaagacctggacgacctccaagacctctggccagacttgatcaatgtcttgaccatcagtcaaaaggctatcttaaacaattccaaaccagttgctgctagtccagagggtttggtggtgacctttgaatatgatattctatgtgagagagcagagtctgacgagaccttgcaaacggctatcggcaattacatcgaaaaaattatcggccgccgtccaagactggtctgtgtgcctgaagacaagtggccgactatccgccgcgattttatcaagcagatgaaaaaagaagatggcagtactaaagctggccaagcaagtgacggcaagtcggatgatgacccaggtcaagaagacaaccaggcccttaacaaggctgtggagcttttcggtaaagacaatattacaatcaaagattaa

SEQ ID NO: 6360 - protein, 590 aa, Alloiococcus otitidis
MTHQALYRVWRPQSFADVSGQHVVTKTLKNAIKNDNTSHAYLFTGPRGTGKTSVAKIFAKAINCPYSDDGEPCNECQICQEITQGSLGDVIEIDAASNNGVEEIRDIREKANYAPTSAVYKVYIIDEVHMLSSGAFNALLKTLEEPPANVVFILATTEPHKIPATIISRTQRFDFKRIDNQDIIDRLIYILEEDQVPYSKEAVLSLANAAEGGMRDALSMLDQALSFMTDELTEEVALQITGSITQSLLLEYLQVISQGQTEEGLKLLQEVLGEGKDPSRFVEDAIMMTRDLLLYQTSQGDNFVPKLARLDDQFEDLAKDLDKEMAYHIIDVLNQTQDDLRLSNHGEVYLEIATVKLSQPSSAVQTIQASQVNMVDQDNKEEIAQLQNQVKSLQQSIQNLQAGAKQGPKQRAKSKAGPKQSGPGKSRSHRHQQGFKVNRKAVYSILDQATRKDLDDLQDLWPDLINVLTISQKAILNNSKPVAASPEGLVVTFEYDILCERAESDETLQTAIGNYIEKIIGRRPRLVCVPEDKWPTIRRDFIKQMKKEDGSTKAGQASDGKSDDDPGQEDNQALNKAVELFGKDNITIKD

SEQ ID NO: 6361 - DNA, 804 bp, Alloiococcus otitidis
  CDS (46)..(801)
gggcgtataatcggtctcgtcaatgataagaaagaaggtatcggaatgcactatactaacgctattgtagttgttggttttacatttattcactatttttcgaaatttttccatttaaataaacattctttgattgctaaattttcctctcttgtcggcggggtttccattgcctatgtcttcttccaccttttgccaagcttaatccactaccaagctgatatttctactgcctacaatctatcggctactagtgccttccagcttttatttgctaccatcctatttggcttaattgttttttacttcttggaagtggccatggagtctagccgtttaaccatgaccatcaaacgtattaacaaccaggacatgtctgatgctagttttgaagaagcccaccaacgtgtcttttgggcccacatggcaccctatgctatctacaatattatcgtcggtatcctcctagcagaccaaagttttgaatccaccaccactgccttgatctacctcctaattattggcttgcacttgtttaccaacgattgggttttacgccaccacttcacccatctctatgacaagttcggtcgtggaattatcaccttcactgttttgcttggttggaccattggctttgccttccacatcaaccacatctttatcgccctattagaagcctttgtagctggcggaattatcctcaacgctatcaaagatgaactccctgaatgcaagggcagcaacttcccacttttcttaatgggaactgcggcttactccctcttcttaattttcatctaa

SEQ ID NO: 6362 - protein, 252 aa, Alloiococcus otitidis
MHYTNAIVVVGFTFIHYFSKFFHLNKHSLIAKFSSLVGGVSIAYVFFHLLPSLIHYQADISTAYNLSATSAFQLLFATILFGLIVFYFLEVAMESSRLTMTIKRINNQDMSDASFEEAHQRVFWAHMAPYAIYNIIVGILLADQSFESTTTALIYLLIIGLHLFTNDWVLRHHFTHLYDKFGRGIITFTVLLGWTIGFAFHINHIFIALLEAFVAGGIILNAIKDELPECKGSNFPLFLMGTAAYSLFLIFI

SEQ ID NO: 6363 - DNA, 1323 bp, Alloiococcus otitidis
  CDS (841)..(1320)
agaaatggtaggtggcaagtcatgaacaagaccctaatcgttgcttggcagtcgctgttaaagaatttaaaatcttggtccttttatattatggttttcatgcccattgtctttcccttgattatcgggttgatttcttactttatatcgagttcgtccgatccgggtacgggggcaggagatgtggacaccatagccctggtcagtaacccagaagacctcttaggggatgagacctgggacggccaagaagaggcctcccttgaccttgtccaagattatcccgacctagaccaggccaagcaagcctaccaagacggggagatagacggcattttagaaatcagcgggcaaagggaccaggttgaagccaccctctaccatgagggcaacttgtcttatgccctcccctaccttgaaggtcaattgagtcaaagtcaggcccaggcgagggcagaccagttggatatctctcaagaagatttgactgccttgacacaaggagttgacataggggataaccagtatttcctagctgaagaggaccctgcccctgcactatttagtgcttcagatatgcaaatggtcttggccgtcttggtcaacctagtgaccttctttttcatcctcttttatgctggtatgatctgtgaagagatcgccaatgaaaaagggtctcgggtcatggaagtcatcctctccagtatcaccgcaagccaacacttttttggcaagctttttggggtggctttgactctccttgtccacttggccatctactttcttttagccctagttggcttctttttcctccgacagaatgaactgttagacatcatcttgcaatttataggccagtccttggcaagtgttcaaggtgtgctagccttgtcagtcctcttcgtcgttttgggggtcttgtcttacaccgttatttcagccttccttgggtccttggtcaccaagacagaagatgccaacaaggttatggttccccttgtcttcctagccctcttcggtttttacttgggcttcttcatccaaagcggggtcttggaagatggtcttttggtcaatgtcctctcccacctgcctttcctcatgcctcatattatgcctttccgcatggccatggggacggtagggggcttggagctagccttgtcgattggagggaatattgtcttcctcatcttccttacctggctatctttagtcttttaccggagcaatgtcttggtttactcttctgaaaactttatgcagcaaatcaaacggtcttggtccttgatgcggagcaaccgcaaggccaaaaacagttaa

SEQ ID NO: 6364 - protein, 160 aa, Alloiococcus otitidis
MQFIGQSLASVQGVLALSVLFVVLGVLSYTVISAFLGSLVTKTEDANKVMVPLVFLALFGFYLGFFIQSGVLEDGLLVNVLSHLPFLMPHIMPFRMAMGTVGGLELALSIGGNIVFLIFLTWLSLVFYRSNVLVYSSENFMQQIKRSWSLMRSNRKAKNS

SEQ ID NO: 6365 - DNA, 1323 bp, Alloiococcus otitidis; identical to SEQ ID NO: 6363
  CDS (91)..(1320)

SEQ ID NO: 6366 - protein, 410 aa, Alloiococcus otitidis
MVFMPIVFPLIIGLISYFISSSSDPGTGAGDVDTIALVSNPEDLLGDETWDGQEEASLDLVQDYPDLDQAKQAYQDGEIDGILEISGQRDQVEATLYHEGNLSYALPYLEGQLSQSQAQARADQLDISQEDLTALTQGVDIGDNQYFLAEEDPAPALFSASDMQMVLAVLVNLVTFFFILFYAGMICEEIANEKGSRVMEVILSSITASQHFFGKLFGVALTLLVHLAIYFLLALVGFFFLRQNELLDIILQFIGQSLASVQGVLALSVLFVVLGVLSYTVISAFLGSLVTKTEDANKVMVPLVFLALFGFYLGFFIQSGVLEDGLLVNVLSHLPFLMPHIMPFRMAMGTVGGLELALSIGGNIVFLIFLTWLSLVFYRSNVLVYSSENFMQQIKRSWSLMRSNRKAKNS

SEQ ID NO: 6367 - DNA, 1323 bp, Alloiococcus otitidis; identical to SEQ ID NO: 6363
  CDS (22)..(1320)

SEQ ID NO: 6368 - protein, 433 aa, Alloiococcus otitidis
MNKTLIVAWQSLLKNLKSWSFYIMVFMPIVFPLIIGLISYFISSSSDPGTGAGDVDTIALVSNPEDLLGDETWDGQEEASLDLVQDYPDLDQAKQAYQDGEIDGILEISGQRDQVEATLYHEGNLSYALPYLEGQLSQSQAQARADQLDISQEDLTALTQGVDIGDNQYFLAEEDPAPALFSASDMQMVLAVLVNLVTFFFILFYAGMICEEIANEKGSRVMEVILSSITASQHFFGKLFGVALTLLVHLAIYFLLALVGFFFLRQNELLDIILQFIGQSLASVQGVLALSVLFVVLGVLSYTVISAFLGSLVTKTEDANKVMVPLVFLALFGFYLGFFIQSGVLEDGLLVNVLSHLPFLMPHIMPFRMAMGTVGGLELALSIGGNIVFLIFLTWLSLVFYRSNVLVYSSENFMQQIKRSWSLMRSNRKAKNS

SEQ ID NO: 6369 - DNA, 1005 bp, Alloiococcus otitidis
  CDS (109)..(1002)
gggcccggaagaaaaaagaaaagaaagaccgttagcaagaatagctgtcctagaaggaggtcctgtaacaatcgactagaaattccaacaagtaatggaggacaaagcatgttagaagtgaaggatttaaggaaaactttcggggatgtggtagcggttgaccaactgtcttttaccatcaaagaaggagagatcatgggattaattggccaaaacgggtcagggaagaccaccagcttccgcttgattttggacttgttcattcccgacaagggttcggtgaagtggaaagggaaggctattgacaagtcaatcctcaaccatattggctacctacctgaagaaagggggctataccccaagcgaacaattgaagaccaggtctattattttgccaggttaaagggcaagaagaaaaaagaaattgaacccctgattgaccgctggatggaccggtttgaagtcaagggcaagcggacagacaaggtcaaggaactgtccaaggggaaccagcaaaaagttcaattgatgaccaccctgatccatgagcccgatttgattatcttagatgagcccttttctggccttgaccctgttaacgctgacctattagaagacagcattaaggaggcagctgaccgtggggcctgtattattttctccagtcacaatatgaataatgtggagcaactttgtgactctgctgtcatgcttaaagatggcaaccgtgttttgggtgggagcttggactccatccggcaaaaatttggtcggaccaaggtttacctggaagcaccggttaccagccaggccctcagtgacctagctggagttagccgggtcctagacttaaagggggacaagaagttggtctacctgactgaccccgaagcaggcaaggccgtctttgacctggccacggctggcggctatatttaccagtttagccagcagcccccaagtttggaagagatctttaaagaaatggtaggtggcaagtcatga

SEQ ID NO: 6370 - protein, 298 aa, Alloiococcus otitidis
MLEVKDLRKTFGDVVAVDQLSFTIKEGEIMGLIGQNGSGKTTSFRLILDLFIPDKGSVKWKGKAIDKSILNHIGYLPEERGLYPKRTIEDQVYYFARLKGKKKKEIEPLIDRWMDRFEVKGKRTDKVKELSKGNQQKVQLMTTLIHEPDLIILDEPFSGLDPVNADLLEDSIKEAADRGACIIFSSHNMNNVEQLCDSAVMLKDGNRVLGGSLDSIRQKFGRTKVYLEAPVTSQALSDLAGVSRVLDLKGDKKLVYLTDPEAGKAVFDLATAGGYIYQFSQQPPSLEEIFKEMVGGKS

SEQ ID NO: 6371 - DNA, 522 bp, Alloiococcus otitidis
  CDS (43)..(519)
gccaagcatgaacaggcagtagaaatagaatggattgaattgatggaagaccagaccaaatggatgcaagaagcccttaaagaagccaggctagctaaagacaagggggaagtccccatcggtgctgtagtggtgaaagatgggacagttattggccggggccacaatcaaaaagaggggtcacaagatgccaccctccatgctgaattgatggccatccgccaggccaaccacactttaggcaattggcgcttggaagactgtgacctctatgtcaccctagagccttgtcccatgtgctctggggccattgtccagtcccggattcgccgggtttactatggcccttatgaccccaagagtggggcggcaggcagtttgatgaatttattgcaggatgaccggctcaaccaccaaacagaagttattccaggtcttctccaagcagactgccaaaaccttttgcaaagcttctttaaagacttgagggcccggaagaaaaaagaaaagaaagaccgttag

SEQ ID NO: 6372 - protein, 159 aa, Alloiococcus otitidis
MEDQTKWMQEALKEARLAKDKGEVPIGAVVVKDGTVIGRGHNQKEGSQDATLHAELMAIRQANHTLGNWRLEDCDLYVTLEPCPMCSGAIVQSRIRRVYYGPYDPKSGAAGSLMNLLQDDRLNHQTEVIPGLLQADCQNLLQSFFKDLRARKKKEKKDR

SEQ ID NO: 6373 - DNA, 522 bp, Alloiococcus otitidis; identical to SEQ ID NO: 6371
  CDS (40)..(519)

SEQ ID NO: 6374 - protein, 160 aa, Alloiococcus otitidis
MMEDQTKWMQEALKEARLAKDKGEVPIGAVVVKDGTVIGRGHNQKEGSQDATLHAELMAIRQANHTLGNWRLEDCDLYVTLEPCPMCSGAIVQSRIRRVYYGPYDPKSGAAGSLMNLLQDDRLNHQTEVIPGLLQADCQNLLQSFFKDLRARKKKEKKDR

SEQ ID NO: 6375 - DNA, 882 bp, Alloiococcus otitidis
  CDS (40)..(879)
tataaggacaagttaaagaaaggggtatcatcatacattatgaaatactttacctttaatgatggcaaccgctatccagctttggccttggggacagtttggatccaaggaaaagaggggctaggaacaattcaaaaggccttggaccttggctaccgggcctttgacacttccactaattactacaatgaagggatgctaggccaggctatccgccagtcttccttggctcgggaagagatttttgtctccgccaagctacccggggctgcccaccaatatgacaaggccatcaaataccttgaagaatccctcttccgcatgggcttggactattttgacaagtatttaatccactggcccctccccatgcaagaccagtatgtggaagcctggcaggctttaattgatgcccaaaaagatggtttaatcaagtccattggagtctctaacttccagcctgaccacctggacaaacttatcaaagagactggggtgaccccagccagcaaccaaattgaacgccacccctactttaataacttagaagttgtgcaagccaaccaagaccgaggcattgtaacggaggcctggtcaccttttggtcggggcatcttaaatgatgtcttaaacaatcaaagggtcgtagacatggcccgcaagtatgacaagcaagcagcccaggtgattttaaactggaactaccaggctggcatcttgtctaatcctcgggctgaccgagaggaccatcttggggctaacttagcctcttttgattttaaattggaccctgatgatatcaaggccctcaataacctagaccagggggaggccggccgggtggaaaaccagcacccagacatttatgaagagtatgtgtag

SEQ ID NO: 6376 - protein, 280 aa, Alloiococcus otitidis
MKYFTFNDGNRYPALALGTVWIQGKEGLGTIQKALDLGYRAFDTSTNYYNEGMLGQAIRQSSLAREEIFVSAKLPGAAHQYDKAIKYLEESLFRMGLDYFDKYLIHWPLPMQDQYVEAWQALIDAQKDGLIKSIGVSNFQPDHLDKLIKETGVTPASNQIERHPYFNNLEVVQANQDRGIVTEAWSPFGRGILNDVLNNQRVVDMARKYDKQAAQVILNWNYQAGILSNPRADREDHLGANLASFDFKLDPDDIKALNNLDQGEAGRVENQHPDIYEEYV

SEQ ID NO: 6377 - DNA, 336 bp, Alloiococcus otitidis
  CDS (16)..(333)
aaaggactgattcatatgtcaaaattagaggataacaaaggaatcttaattggtttaggagcagctgcagcagtcggcctaggtgtatttgctatcttcttgtcttctgaagaagttcaagaaaaatcaaaagccctcgtcaaccgtcaacgagccaaataccttgtccggactaaattagacgggaacgataaggtcttgaaggctgttgacaagttggatgacactagtgtcaataacctcctgtcaacttttgacagtgtaaacgacttagaagaccaattagaggacaaagtcagtgatgctgttaacttcttaaaaaaggcagttaagtaa

SEQ ID NO: 6378 - protein, 106 aa, Alloiococcus otitidis
MSKLEDNKGILIGLGAAAAVGLGVFAIFLSSEEVQEKSKALVNRQRAKYLVRTKLDGNDKVLKAVDKLDDTSVNNLLSTFDSVNDLEDQLEDKVSDAVNFLKKAVK

SEQ ID NO: 6379 - DNA, 2511 bp, Alloiococcus otitidis
  CDS (1)..(2508)
atggaagaactattcacggacaaggccaaagaggtcttgctcatagcccaaaaagaagccaaatcctataaccactattccattggttcagagcacttgttgctaggcttgattgaggaagaagaaggcatagcaggtaaggttttacgggaattagatttaaccacccaagatgttagagatgaattagaacgctttgtcacctttgcccaagactctaaactgccctccaatgccatcctaccttattcctacaaggctagaaaggtagtccagtatgcagcggatgaagcccgcaaaatgcagcggaaaaaagtaggaacggaacacctcctactgggcttgctcagagatgacaaattactgtctgcaaaattactagagaacctagctgtagacttgtcttccgtccgacaattggtcttagaaaaatttggcatcagcgaccaggctagccgccagggacaaagacggacccggagccgtaaacaaggcatgggggggcacccggccaacagtcaggaagctggcggaacgccgaccctggatgccctagcccgggacctgacagccatggctgctaagaaggacttggaccctattgtgggtcgggacttggaaattaggcggattacccaggttttaagccggcggaccaaaaacaacccggtcctagttggcgaagctggggttgggaagacagccattgcagaaggactggcccaaaagattgtcaacaaggaagtgccacctgtcttgcaaaataaaagactgatgaccttggacatggggtcattggttgccggtaccaaataccggggtgaatttgaagaccggatgaagaaaatcatcaatgaaatttacaatgacggcaatgtcatcttatttattgacgaacttcataccttgattggggctgggagtgccgaaggggccattgatgcctccaacttaatcaaaccagccttggctcggggagaactccaaaccattggggcaactaccctggatgaataccagaaacacatcgaaaaagatccagccctcgaacgccgttttgcttcagtattggtcaagcaaccgagcgaggccgaaacggtggaaattttaaatggcttgaaagaccgttatgaagaccaccatggcgtggagatcagccaagaagcagttgaacatgctgttaagttgtccacccgctatattacagaccggcaactaccagacaaggccattgacttgatcgacgaggcttcagccaaggttagattagaccagacagacggccagtctaacttgaatgaagcaactgagaagctcaatgacctatacaaggaaaaagaccgcctaatccaaaaccaagagtttgaagaggcggctaaaatccgcaagcaagaaatgaagcaacaaaacaaggttcaaaagctttacaaagaaaaacaagaccaaggccaagctgaccggccgaaggttaagggcgaggatatagctgatgtcgttgctcaatggactggcattccggtcaaagaaatgaaaaaagaagaaagtcagcgcctactccaacttgaggacaaccttcatgaacgagtggttggtcaagaagaagcggtgaaggctgtttccaaagccatccgccgtgcccggtctggcttgaaagaccctaaccgtcctattggatcctttatcttcctaggacctaccggggttgggaagaccgaattagctaaaactgtggcagccaccttgtttgggtcagaagatgacctgatccggattgacatgtctgaatttatggaaaaacactccaccagccgtctagcaggttctcctccaggctatgttggctatgatgaagggggccaattaacagaaaaaatccgcaataacccttattcggtcgtcctctttgatgaggtcgaaaaagcccacccagatgtctttaacatgttgctccaggtcttagatgacggtcagttaacagatggtaaagggcgccaggtcgacttcaaaaacactgtcttgattatgaccaccaatattggggccaccagcttacgggatgacaaggaagtcggttttggtaaacaagacttgaaatttgactacgagaccatgcgcaaacgcatgctggatgagctcaaagattacttccgaccagaatttatcaaccgcctggacgaaaccattgtcttccacaccttagacaaagaccacttgcatgacattgtccgcttgctcgcagaggacttaatcaagcgtttggctgacctagccattgatctcaagattaccccagccgcaattgacgtgattgccgataagggttacgaccctgaatatggtgcgagacccttgaaacgggcccttcaaacccaaattgaagaccggctcagtgatgccttgctcagcggtgaaattattgctggagacaaggtaaccattggagctagcaaggggtccattaccttgaaagtaagggagcgcagtcaagaagccgaaaccagtaaggcttaa

SEQ ID NO: 6380 - protein, 836 aa, Alloiococcus otitidis
MEELFTDKAKEVLLIAQKEAKSYNHYSIGSEHLLLGLIEEEEGIAGKVLRELDLTTQDVRDELERFVTFAQDSKLPSNAILPYSYKARKVVQYAADEARKMQRKKVGTEHLLLGLLRDDKLLSAKLLENLAVDLSSVRQLVLEKFGISDQASRQGQRRTRSRKQGMGGHPANSQEAGGTPTLDALARDLTAMAAKKDLDPIVGRDLEIRRITQVLSRRTKNNPVLVGEAGVGKTAIAEGLAQKIVNKEVPPVLQNKRLMTLDMGSLVAGTKYRGEFEDRMKKIINEIYNDGNVILFIDELHTLIGAGSAEGAIDASNLIKPALARGELQTIGATTLDEYQKHIEKDPALERRFASVLVKQPSEAETVEILNGLKDRYEDHHGVEISQEAVEHAVKLSTRYITDRQLPDKAIDLIDEASAKVRLDQTDGQSNLNEATEKLNDLYKEKDRLIQNQEFEEAAKIRKQEMKQQNKVQKLYKEKQDQGQADRPKVKGEDIADVVAQWTGIPVKEMKKEESQRLLQLEDNLHERVVGQEEAVKAVSKAIRRARSGLKDPNRPIGSFIFLGPTGVGKTELAKTVAATLFGSEDDLIRIDMSEFMEKHSTSRLAGSPPGYVGYDEGGQLTEKIRNNPYSVVLFDEVEKAHPDVFNMLLQVLDDGQLTDGKGRQVDFKNTVLIMTTNIGATSLRDDKEVGFGKQDLKFDYETMRKRMLDELKDYFRPEFINRLDETIVFHTLDKDHLHDIVRLLAEDLIKRLADLAIDLKITPAAIDVIADKGYDPEYGARPLKRALQTQIEDRLSDALLSGEIIAGDKVTIGASKGSITLKVRERSQEAETSKA

SEQ ID NO: 6381 - DNA, 273 bp, Alloiococcus otitidis
  CDS (1)..(270)
atgggaagttggcgcatcccattccctttaagccttactggtttcggcttcttgactgcgctcccttactttcaaggtaatggaccccttgctagctccaatggttaccttgtctccagcaataatttcaccgctgagcaaggcatcactgagccggtcttcaatttgggtttgaagggcccgtttcaagggtctcgcaccatattcagggtcgtaacccttatcggcaatcacgtcaattgcggctggggtaatcttgagatcaatggctag

SEQ ID NO: 6382 - protein, 90 aa, Alloiococcus otitidis
MGSWRIPFPLSLTGFGFLTALPYFQGNGPLASSNGYLVSSNNFTAEQGITEPVFNLGLKGPFQGSRTIFRVVTLIGNHVNCGWGNLEING

SEQ ID NO: 6383 - DNA, 342 bp, Alloiococcus otitidis
  CDS (73)..(339)
atttcattgatgattttcttcatccggtcttcaaattcaccccggtatttggtaccggcaaccaatgaccccatgtccaaggtcatcagtcttttattttgcaagacaggtggcacttccttgttgacaatcttttgggccagtccttctgcaatggctgtcttcccaaccccagcttcgccaactaggaccgggttgtttttggtccgccggcttaaaacctgggtaatccgcctaatttccaagtcccgacccacaatagggtccaagtccttcttagcagccatggctgtcaggtcccgggctagggcatccagggtcggcgttccgccagcttcctga

SEQ ID NO: 6384 - protein, 89 aa, Alloiococcus otitidis
MSKVISLLFCKTGGTSLLTIFWASPSAMAVFPTPASPTRTGLFLVRRLKTWVIRLISKSRPTIGSKSFLAAMAVRSRARASRVGVPPAS

SEQ ID NO: 6385 - DNA, 342 bp, Alloiococcus otitidis; identical to SEQ ID NO: 6383
  CDS (10)..(339)

SEQ ID NO: 6386 - protein, 110 aa, Alloiococcus otitidis
MIFFIRSSNSPRYLVPATNDPMSKVISLLFCKTGGTSLLTIFWASPSAMAVFPTPASPTRTGLFLVRRLKTWVIRLISKSRPTIGSKSFLAAMAVRSRARASRVGVPPAS

SEQ ID NO: 6387 - DNA, 483 bp, Alloiococcus otitidis
  CDS (25)..(480)
aagaataaaatgggataccaacacatgtcagatatcattgaagcctatttaaaacaagtactcagtaacaaagaagaagtcgaaattaaacgtagtgaaattgctaaccggtttgattgtgttccctcacagatcaactatgtgatcaacacccgctttaccgtccaacaaggttacctggtggaaagcaagcggggcgggggtggatttatccgaatttctaaggttaaaatcttggaagaagcggatgttattgataagatgatagccatcatcggtaaaacaatcagtgaacgtgatgctgtttcgattgtcaaaaaactattagaagagcaaattgtgagtcgccgggaagctaagttaatgcttgtcgcaatggagaaaacgctttacacaggtgacttagccgttgatgaattactcagagccaatattttaaaatccatgttaaaagaattacgatatgaaaaaactaatcattga

SEQ ID NO: 6388 - protein, 152 aa, Alloiococcus otitidis
MSDIIEAYLKQVLSNKEEVEIKRSEIANRFDCVPSQINYVINTRFTVQQGYLVESKRGGGGFIRISKVKILEEADVIDKMIAIIGKTISERDAVSIVKKLLEEQIVSRREAKLMLVAMEKTLYTGDLAVDELLRANILKSMLKELRYEKTNH

SEQ ID NO: 6389 - DNA, 483 bp, Alloiococcus otitidis; identical to SEQ ID NO: 6387
  CDS (10)..(480)

SEQ ID NO: 6390 - protein, 157 aa, Alloiococcus otitidis
MGYQHMSDIIEAYLKQVLSNKEEVEIKRSEIANRFDCVPSQINYVINTRFTVQQGYLVESKRGGGGFIRISKVKILEEADVIDKMIAIIGKTISERDAVSIVKKLLEEQIVSRREAKLMLVAMEKTLYTGDLAVDELLRANILKSMLKELRYEKTNH

SEQ ID NO: 6391 - DNA, 777 bp, Alloiococcus otitidis
  CDS (121)..(774)
agttggggaatacgaattaaatcgttacgcagaaaactactttgcagaagtggaacagttttgcctcttccccagccaacccaagtaccaggaattggtatttcgcctgaccgtatgttaatgacccgggtctttgcttatggcgatgcggctcgctaccgtttgggtgtcacccaccaccaaatccctgtcaaccagccgaaaggtgttaaagacttccacacccaacaccgggacggtcaaggccgggtagacggcaatggcggttctgaaatccacaatggagtgaactcctacggtaactgggtcgaccaccccgaaaacgctgaacccccattcccaggtggggaggtagactaccacgaattccgtgaagatgatgacgattactacacccaacctggtatcctcttcagccgcatgactgaagaccaacaacaggtcttgtttgaaaacactgcccgcaacatgggggactcaaccctacaaatcaaacaccgtcacatccgtcactgctactttgctgaccctaaatacggtgaaggtgttgcccaagcattggggattgatattgatgatgtggacttggaacgttggccagaggatacagaagagaacctagccaagtccaacgaccgagactttgaagacaaaaacgtgccgactgaaccggctgaccctgaatcagctaaagatttgccggaagaaggccgggacaccaactatgacgaaatcacttcagtcatcgatgctgacgatgacccttacttcctctaa

SEQ ID NO: 6392 - protein, 218 aa, Alloiococcus otitidis
MTRVFAYGDAARYRLGVTHHQIPVNQPKGVKDFHTQHRDGQGRVDGNGGSEIHNGVNSYGNWVDHPENAEPPFPGGEVDYHEFREDDDDYYTQPGILFSRMTEDQQQVLFENTARNMGDSTLQIKHRHIRHCYFADPKYGEGVAQALGIDIDDVDLERWPEDTEENLAKSNDRDFEDKNVPTEPADPESAKDLPEEGRDTNYDEITSVIDADDDPYFL

SEQ ID NO: 6393 - DNA, 777 bp, Alloiococcus otitidis; identical to SEQ ID NO: 6391
  CDS (115)..(774)

SEQ ID NO: 6394 - protein, 220 aa, Alloiococcus otitidis
MLMTRVFAYGDAARYRLGVTHHQIPVNQPKGVKDFHTQHRDGQGRVDGNGGSEIHNGVNSYGNWVDHPENAEPPFPGGEVDYHEFREDDDDYYTQPGILFSRMTEDQQQVLFENTARNMGDSTLQIKHRHIRHCYFADPKYGEGVAQALGIDIDDVDLERWPEDTEENLAKSNDRDFEDKNVPTEPADPESAKDLPEEGRDTNYDEITSVIDADDDPYFL

SEQ ID NO: 6395 - DNA, 777 bp, Alloiococcus otitidis; identical to SEQ ID NO: 6391
  CDS (61)..(774)

SEQ ID NO: 6396 - protein, 238 aa, Alloiococcus otitidis
MPLPQPTQVPGIGISPDRMLMTRVFAYGDAARYRLGVTHHQIPVNQPKGVKDFHTQHRDGQGRVDGNGGSEIHNGVNSYGNWVDHPENAEPPFPGGEVDYHEFREDDDDYYTQPGILFSRMTEDQQQVLFENTARNMGDSTLQIKHRHIRHCYFADPKYGEGVAQALGIDIDDVDLERWPEDTEENLAKSNDRDFEDKNVPTEPADPESAKDLPEEGRDTNYDEITSVIDADDDPYFL

SEQ ID NO: 6397 - DNA, 1059 bp, Alloiococcus otitidis
  CDS (16)..(1056)
tttatgaaaaatccaatggacaaaaatggattaggcaagccggaagcaagccggaaccaacgagtcggcaaaaatccaagcttgcaaaatgcggctggaattccagtcaccagtaaccacaactccatgacagcaggcaaacggggtgcaggtgtcttaaatgaccactggttgctcgaaaaacatgcccactttaaccgtgaagttattccggaacgccggatgcacgcgaaaggttctggggcttacggaacttttaccgtaacaaatgacatcaccaagtataccaaagcaaaaatcttctctgaagtaggtaaaaaaactgaaatgttccaacgtttctccactgtagccggagaacgcggtgcggcagatgctgaacgggacattcgtggttttgcccttaaattctatactgaagaagggaactgggacttagtggggaacaatacccctgttttcttcatccgtgatcctaaacactttatcgaattaaaccgtgccgttaaacgggacccccgcaccaacttgcggtcgcctaacaacaactgggacttctggacccgcttgcctgaatccctccaccaagtcactattaccatgagtgaccggggaatcccttcatcttaccgccatatgcatggattttcctcccatacttacagcttgattaatgcagataatgagcgggtttgggttaaattccacctgcgttcccaacaagggatccagaacttaacagaccaagaagctgaagcagtggtagggatggaccgggaatcccaccaggtcgacttgtacaatgccattgaacaaggcaagtacccgaaatggaagatgtacatccaggtcatgactgaagaagaagccaaaaacctaccttacaacccatttgacttaaccaagtcttggtacaagaaagacttcccattgattgaagttggggaatacgaattaaatcgttacgcagaaaactactttgcagaagtggaacagttttgcctcttccccagccaacccaagtaccaggaattggtatttcgcctgaccgtatgttaa

SEQ ID NO: 6398 - protein, 347 aa, Alloiococcus otitidis
MDKNGLGKPEASRNQRVGKNPSLQNAAGIPVTSNHNSMTAGKRGAGVLNDHWLLEKHAHFNREVIPERRMHAKGSGAYGTFTVTNDITKYTKAKIFSEVGKKTEMFQRFSTVAGERGAADAERDIRGFALKFYTEEGNWDLVGNNTPVFFIRDPKHFIELNRAVKRDPRTNLRSPNNNWDFWTRLPESLHQVTITMSDRGIPSSYRHMHGFSSHTYSLINADNERVWVKFHLRSQQGIQNLTDQEAEAVVGMDRESHQVDLYNAIEQGKYPKWKMYIQVMTEEEAKNLPYNPFDLTKSWYKKDFPLIEVGEYELNRYAENYFAEVEQFCLFPSQPKYQELVFRLTVC

SEQ ID NO: 6399 - DNA, 1059 bp, Alloiococcus otitidis; identical to SEQ ID NO: 6397
  CDS (4)..(1056)

SEQ ID NO: 6400 - protein, 351 aa, Alloiococcus otitidis
MKNPMDKNGLGKPEASRNQRVGKNPSLQNAAGIPVTSNHNSMTAGKRGAGVLNDHWLLEKHAHFNREVIPERRMHAKGSGAYGTFTVTNDITKYTKAKIFSEVGKKTEMFQRFSTVAGERGAADAERDIRGFALKFYTEEGNWDLVGNNTPVFFIRDPKHFIELNRAVKRDPRTNLRSPNNNWDFWTRLPESLHQVTITMSDRGIPSSYRHMHGFSSHTYSLINADNERVWVKFHLRSQQGIQNLTDQEAEAVVGMDRESHQVDLYNAIEQGKYPKWKMYIQVMTEEEAKNLPYNPFDLTKSWYKKDFPLIEVGEYELNRYAENYFAEVEQFCLFPSQPKYQELVFRLTVC

SEQ ID NO: 6401 - DNA, 399 bp, Alloiococcus otitidis
  CDS (34)..(396)
tataataaagtatatttgagggggccagccatcatgctaaacaaaaaatataccaagcgagaagttgatatcttagagacactctgggacgaaggcaagcctttatccgttaatgagattgccaactccagtggtattagcaaaaatacggtcgctccgattttaaaaaaattactggacaagcactgtatcaaagttgaagatgtcttttactctgccaaatcccttacccgaaagttcctccccctgatggaccgggaaaaatttatcatagatgcctttcaaaatatacatattggcaatttcctaaaccactacttagaccgccactgcgaccaggaaatcctagacaggctcgaagctattattcaggaaaaaagggataaacttcaggcttga

SEQ ID NO: 6402 - protein, 121 aa, Alloiococcus otitidis
MLNKKYTKREVDILETLWDEGKPLSVNEIANSSGISKNTVAPILKKLLDKHCIKVEDVFYSAKSLTRKFLPLMDREKFIIDAFQNIHIGNFLNHYLDRHCDQEILDRLEAIIQEKRDKLQA

SEQ ID NO: 6403 - DNA, 399 bp, Alloiococcus otitidis; identical to SEQ ID NO: 6401
  CDS (16)..(396)

SEQ ID NO: 6404 - protein, 127 aa, Alloiococcus otitidis
MRGPAIMLNKKYTKREVDILETLWDEGKPLSVNEIANSSGISKNTVAPILKKLLDKHCIKVEDVFYSAKSLTRKFLPLMDREKFIIDAFQNIHIGNFLNHYLDRHCDQEILDRLEAIIQEKRDKLQA

SEQ ID NO: 6405 - DNA, 414 bp, Alloiococcus otitidis
  CDS (190)..(411)
aagtttatacccacaactgccgggggcaactatgcttccagaagtttttcggatgggacttatgagtctatttcagatagcttcttaaaaaacctccgttatgaccgctttttcttagagtgggacgatgaggacagagtcggtagcttgactgctctagaagccttcagtgaccgacctgataccgaggtggtcctgggccttctctctagtaagacggaccatttagatgacgcagaccgggccttgtcgatccttgaagaagccagcaagtatgtagacaaggacaagctctacctgtcccaccaatgtggctttgcctcgaccgatatcggtaatgagttaaccatcgaccaacaatgggataagattaagcaaggtcaagaaattgcccaaaaattctggggcgaataa

SEQ ID NO: 6406 - protein, 74 aa, Alloiococcus otitidis
MVLGLLSSKTDHLDDADRALSILEEASKYVDKDKLYLSHQCGFASTDIGNELTIDQQWDKIKQGQEIAQKFWGE

SEQ ID NO: 6407 - DNA, 414 bp, Alloiococcus otitidis; identical to SEQ ID NO: 6405
  CDS (148)..(411)

SEQ ID NO: 6408 - protein, 88 aa, Alloiococcus otitidis
MTALEAFSDRPDTEVVLGLLSSKTDHLDDADRALSILEEASKYVDKDKLYLSHQCGFASTDIGNELTIDQQWDKIKQGQEIAQKFWGE

SEQ ID NO: 6409 - DNA, 846 bp, Alloiococcus otitidis
  CDS (34)..(843)
tcggcaagtcaagcaacttgtaagggggaattgatgatgaccacatcgaaccgttttttaacagttggatcattgctcagaccagaagaattactcaaatacagggataaaatccaagtagccgaggatatttcctatcctttttatgactactttgatggttacaaggaagtagaagaccaggccgttaaagaggttgtggccaagcaggcggaagtcggaatcccggaattgacagatggggaataccccagatcactctggcatacagactttgtttggggcttaaatggggcccgccgttatatcactgaccagggttacttcttccgggacaaagacaataagaagtccaattatgaaacccgtcgcgatattgggacgacctttgaccaagccattgatgggaagaaccatcccttcttggaccactaccgccgtctgcgcgaatttgcaccagatggggctgacttgaagctcagtattccctctccttctcatatttatggcgagaatatcgtctttgaccaattacagggtagctattatgaagggaaggaagaggaatttcgtaaggatttggcccaagcttataaagacttcctagatgactacaaggcaattggcggcaagaccattcagttggatgactgcctctgggagctctttgcagaccaagaccacccatttattaaaaacaaggataattttgaagttcgaccagaagactttattgaccttaacaatgaaattattgactatgctcatgatttaggcttaaaagtttatacccacaactgccgggggcaactatgcttccagaagtttttcggatgggacttatga

SEQ ID NO: 6410 - protein, 270 aa, Alloiococcus otitidis
MMTTSNRFLTVGSLLRPEELLKYRDKIQVAEDISYPFYDYFDGYKEVEDQAVKEVVAKQAEVGIPELTDGEYPRSLWHTDFVWGLNGARRYITDQGYFFRDKDNKKSNYETRRDIGTTFDQAIDGKNHPFLDHYRRLREFAPDGADLKLSIPSPSHIYGENIVFDQLQGSYYEGKEEEFRKDLAQAYKDFLDDYKAIGGKTIQLDDCLWELFADQDHPFIKNKDNFEVRPEDFIDLNNEIIDYAHDLGLKVYTHNCRGQLCFQKFFGWDL

SEQ ID NO: 6411 - DNA, 846 bp, Alloiococcus otitidis; identical to SEQ ID NO: 6409
  CDS (31)..(843)

SEQ ID NO: 6412 - protein, 271 aa, Alloiococcus otitidis
MMMTTSNRFLTVGSLLRPEELLKYRDKIQVAEDISYPFYDYFDGYKEVEDQAVKEVVAKQAEVGIPELTDGEYPRSLWHTDFVWGLNGARRYITDQGYFFRDKDNKKSNYETRRDIGTTFDQAIDGKNHPFLDHYRRLREFAPDGADLKLSIPSPSHIYGENIVFDQLQGSYYEGKEEEFRKDLAQAYKDFLDDYKAIGGKTIQLDDCLWELFADQDHPFIKNKDNFEVRPEDFIDLNNEIIDYAHDLGLKVYTHNCRGQLCFQKFFGWDL

SEQ ID NO: 6413 - DNA, 756 bp, Alloiococcus otitidis
  CDS (1)..(753)
atgatcatgacaagtttacagcaattattagggcaactgaaagaccgagagtgggtcaatttgagtcatccagttgactcgactatcccacatttttcagcttttagtccgattgaagtaacaactattgccaccatcgaagaagatggtttctggggccaacaagtcgaaattgggacccaatacgggacccacgtggatgcgcccaaccatttcgctaaggggactcgtgaattagctgccttaagcttaaaagaacggaccctgccactttatgtgattcacaaggaggaagccgtccgagaaaatcccgattacacggtcggggttgaagatatcaaggattttgaaaaagtacacggcaagatcccggccaagtcttttgtcgctttggccacagcctggtcagaccgttttgaccagccggatagcttctataaccgtgatagcgatggggtagaacacacaccaggttggtccattgaagccttgcaattccttcatgaggaaagagatgtgacggcaatcgggcacgaaaccttaaacacagacgctggtattgccattgcagaaacaggagccaatcccggggaattatattggctcaagcaagataaataccaagtggaagtgatcaagggacttgctgacctaccggctacaggggccctgattcatattgctgtaccaaatattgttggcttgactggttttaatgcggaagtttttgctattttgccaggagaagctgactag

SEQ ID NO: 6414 - protein, 251 aa, Alloiococcus otitidis
MIMTSLQQLLGQLKDREWVNLSHPVDSTIPHFSAFSPIEVTTIATIEEDGFWGQQVEIGTQYGTHVDAPNHFAKGTRELAALSLKERTLPLYVIHKEEAVRENPDYTVGVEDIKDFEKVHGKIPAKSFVALATAWSDRFDQPDSFYNRDSDGVEHTPGWSIEALQFLHEERDVTAIGHETLNTDAGIAIAETGANPGELYWLKQDKYQVEVIKGLADLPATGALIHIAVPNIVGLTGFNAEVFAILPGEAD

SEQ ID NO: 6415 - DNA, 555 bp, Alloiococcus otitidis
  CDS (73)..(552)
gaaaacaacaatcaattaggagaattaacaatgtcaaaacaatattatgatgagaacggcaatccagtagtagtgaagaaaaagggcggatgcttaaaatgggtgattggtatagtcctattaatcatcctaattggagcttgtacgtccttatttgcagaagaagaaaccaaccctaacgataatcaaccaactgaaactgaagaaacaagtgaaaatgaagaagtagaaagcacagaaaatgatgtccctcgagaatatgaaaatgccttggctagtgcacaaaactatgtggatataatgcctttttcagaaaaaggattataccagcagttaacatctgaagccggggatcaataccctgaagaagctgctcaatatgcaattgaaaacgtagaagtagactataacgaggaagcacttgaagctgctgaaaattatcaagataccttcccaatgtctgacgctgaacttttcaaccaattaacatccgaagctggagaccaattcaccaacgaacaagctcaatatgctattgataatttagaagactaa

SEQ ID NO: 6416 - protein, 160 aa, Alloiococcus otitidis
MKKKGGCLKWVIGIVLLIILIGACTSLFAEEETNPNDNQPTETEETSENEEVESTENDVPREYENALASAQNYVDIMPFSEKGLYQQLTSEAGDQYPEEAAQYAIENVEVDYNEEALEAAENYQDTFPMSDAELFNQLTSEAGDQFTNEQAQYAIDNLED

SEQ ID NO: 6417 - DNA, 555 bp, Alloiococcus otitidis; identical to SEQ ID NO: 6415
  CDS (31)..(552)

SEQ ID NO: 6418 - protein, 174 aa, Alloiococcus otitidis
MSKQYYDENGNPVVVKKKGGCLKWVIGIVLLIILIGACTSLFAEEETNPNDNQPTETEETSENEEVESTENDVPREYENALASAQNYVDIMPFSEKGLYQQLTSEAGDQYPEEAAQYAIENVEVDYNEEALEAAENYQDTFPMSDAELFNQLTSEAGDQFTNEQAQYAIDNLED

SEQ ID NO: 6419 - DNA, 198 bp, Alloiococcus otitidis
  CDS (1)..(195)
atgtatgctgactctgaaaagatcaaaaaactattagaacagaacagtcaatatcgcatttcaaaagaaacaggcattaatcaatccatcttgtctagagttgtgagcggcgaacgtaagatagaaaatttaacctttagggtggctagcactctgacggaatacgctgaaaaaattgagaaaaaagaccaatcttaa

SEQ ID NO: 6420 - protein, 65 aa, Alloiococcus otitidis
MYADSEKIKKLLEQNSQYRISKETGINQSILSRVVSGERKIENLTFRVASTLTEYAEKIEKKDQS

SEQ ID NO: 6421 - DNA, 942 bp, Alloiococcus otitidis
  CDS (130)..(939)
gtggtaagtatcaagcaggaccttgtacccaatagcattgcgaacggagtcattttaggaaccaacaataaaacggactatatcactattcacgaaacagcaaacaccgacaacggcgcagacgccgaaatgcacgctcaactacaacgaaatggcaacaaccgtagcgcttcttggcattaccaagtagatgataaaggcgctattcagtcatttcttgataccacctcttgtatgcacgctggtgatggcgctaacggcaccggaaacctccacagcattggcattgaaacttgcgtgaacgctgacggggactttgagaaaaccattcaaaatctggtggaattagtccaagaactccaagaacgtcacaacatttcaaatgacaatgttgttcaacacaatcattggtcaggaaaagattgcccgcacttcttgcgaaatggtgaaaaagggatcacttggcaagactttaaagatcgtttagcgggcaaatcaagcgggtccgccaacgtggaagaagatgagtctaccgacgaaaaagtgtaccgcgtccaaactggcgcttttagcaataaagaaaatgccgaaaaagaagttgaaaaagccaaagacaaattaggggacgccttcattgcagaaggcactcaagaaaaaacatctggcttccccgaagaagtcgccggcgcgaagctggtgaaggaagaagatgcttatttcaaagcaaacgaaaaaatcaaagtcagagacaaaccttctaccgacgctaaacacaccggcacccttccaaaaggcgaaagcattcactattttgctgtgtatgaaggcaacggatacagatggcttagataccacactgaaaacggtgtacgctacttgccttaccgagaaagcggcaaaggaaacaaagcgtgggggaccttccacgacgaacgaccataa

SEQ ID NO: 6422 - protein, 270 aa, Alloiococcus otitidis
MHAQLQRNGNNRSASWHYQVDDKGAIQSFLDTTSCMHAGDGANGTGNLHSIGIETCVNADGDFEKTIQNLVELVQELQERHNISNDNVVQHNHWSGKDCPHFLRNGEKGITWQDFKDRLAGKSSGSANVEEDESTDEKVYRVQTGAFSNKENAEKEVEKAKDKLGDAFIAEGTQEKTSGFPEEVAGAKLVKEEDAYFKANEKIKVRDKPSTDAKHTGTLPKGESIHYFAVYEGNGYRWLRYHTENGVRYLPYRESGKGNKAWGTFHDERP

SEQ ID NO: 6423 - DNA, 942 bp, Alloiococcus otitidis; identical to SEQ ID NO: 6421
  CDS (1)..(939)

SEQ ID NO: 6424 - protein, 313 aa, Alloiococcus otitidis
MVSIKQDLVPNSIANGVILGTNNKTDYITIHETANTDNGADAEMHAQLQRNGNNRSASWHYQVDDKGAIQSFLDTTSCMHAGDGANGTGNLHSIGIETCVNADGDFEKTIQNLVELVQELQERHNISNDNVVQHNHWSGKDCPHFLRNGEKGITWQDFKDRLAGKSSGSANVEEDESTDEKVYRVQTGAFSNKENAEKEVEKAKDKLGDAFIAEGTQEKTSGFPEEVAGAKLVKEEDAYFKANEKIKVRDKPSTDAKHTGTLPKGESIHYFAVYEGNGYRWLRYHTENGVRYLPYRESGKGNKAWGTFHDERP

SEQ ID NO: 6425 - DNA, 243 bp, Alloiococcus otitidis
  CDS (13)..(240)
gtgccttctgcaatgaaggcgtcccctaatttgtctttggctttttcaacttctttttcggcattttctttattgctaaaagcgccagtttggacgcggtacactttttcgtcggtagactcatcttcttccacgttggcggacccgcttgatttgcccgctaaacgatctttaaagtcttgccaagtgatccctttttcaccatttcgcaagaagtgcgggcaatcttttcctgaccaatga

SEQ ID NO: 6426 - protein, 76 aa, Alloiococcus otitidis
MKASPNLSLAFSTSFSAFSLLLKAPVWTRYTFSSVDSSSSTLADPLDLPAKRSLKSCQVIPFSPFRKKCGQSFPDQ

SEQ ID NO: 6427 - DNA, 243 bp, Alloiococcus otitidis; identical to SEQ ID NO: 6425
  CDS (1)..(240)

SEQ ID NO: 6428 - protein, 80 aa, Alloiococcus otitidis
MPSAMKASPNLSLAFSTSFSAFSLLLKAPVWTRYTFSSVDSSSSTLADPLDLPAKRSLKSCQVIPFSPFRKKCGQSFPDQ

SEQ ID NO: 6429 - DNA, 303 bp, Alloiococcus otitidis
  CDS (70)..(300)
tattattcggcacggcgaacgtatcgaaaagaacaagaacaaactgaacccttgaaaggaggtgacagagtgcggttaagtgaccggacgtataagatcctgaagtggctgatagcgatcgtgctaccagcttttattacgtttttaggtgtcgtatttgaagccttaggcgtagcctatggcgggaccattctcaccatattagcagcctttcaaacctttttaggaacgatattcaagactggtgagtatcgatacgataaggacaaagaagaagcgcgaaaggatgatattgagtggtaa

SEQ ID NO: 6430 - protein, 77 aa, Alloiococcus otitidis
MRLSDRTYKILKWLIAIVLPAFITFLGVVFEALGVAYGGTILTILAAFQTFLGTIFKTGEYRYDKDKEEARKDDIEW

SEQ ID NO: 6431 - DNA, 303 bp, Alloiococcus otitidis; identical to SEQ ID NO: 6429
  CDS (52)..(300)

SEQ ID NO: 6432 - protein, 83 aa, Alloiococcus otitidis
MKGGDRVRLSDRTYKILKWLIAIVLPAFITFLGVVFEALGVAYGGTILTILAAFQTFLGTIFKTGEYRYDKDKEEARKDDIEW

SEQ ID NO: 6433 - DNA, 318 bp, Alloiococcus otitidis
  CDS (22)..(315)
tacattgctggagggaaacatttggaaatcgatattgtcagtattggcaccattgccggcgccattattgcgattgtcacgctagctaaattagtcgttgaaccttttcgaaccacaatgaagcgcaatgatgaaacaatgaagaccttaaaggaaagcattgacagcctagcccgcgatatgcaggaaagccggaaagaagcggccgacatgaagaaaatcattgacaatcatgaagtccgaattggccgaaatgaagataatattattcggcacggcgaacgtatcgaaaagaacaagaacaaactgaacccttga

SEQ ID NO: 6434 - protein, 98 aa, Alloiococcus otitidis
MEIDIVSIGTIAGAIIAIVTLAKLVVEPFRTTMKRNDETMKTLKESIDSLARDMQESRKEAADMKKIIDNHEVRIGRNEDNIIRHGERIEKNKNKLNP

SEQ ID NO: 6435 - DNA, 417 bp, Alloiococcus otitidis
  CDS (16)..(414)
aggaggacgcacttgatgagtaatttacaatacgaagccccaaaccataaccaagaagcccaattgtacattgatggacgtcagatagtccgtttttcagccagtgtgaatggcactcgtttgcccacctacaatgcttggttgacgcctgacgttagcgaagaagactatcagaaatatcacgaagatatccacgaggcctatattgaattcgtcaaacgtcaaagcgctaacgaaagcaagcttattgaccgtattcaagctagtcaatcgaaccgtaaaggaagcaaaaataaaagcgagaacaaatccaacacccaactgattagcgggactcctcaaggtgtagaagctactagagacgaaagtcaaccgacaggacttactcaccgaaaacagcaaggcgaagaggactaa

SEQ ID NO: 6436 - protein, 133 aa, Alloiococcus otitidis
MSNLQYEAPNHNQEAQLYIDGRQIVRFSASVNGTRLPTYNAWLTPDVSEEDYQKYHEDIHEAYIEFVKRQSANESKLIDRIQASQSNRKGSKNKSENKSNTQLISGTPQGVEATRDESQPTGLTHRKQQGEED

SEQ ID NO: 6437 - DNA, 417 bp, Alloiococcus otitidis; identical to SEQ ID NO: 6435
  CDS (13)..(414)

SEQ ID NO: 6438 - protein, 134 aa, Alloiococcus otitidis
MMSNLQYEAPNHNQEAQLYIDGRQIVRFSASVNGTRLPTYNAWLTPDVSEEDYQKYHEDIHEAYIEFVKRQSANESKLIDRIQASQSNRKGSKNKSENKSNTQLISGTPQGVEATRDESQPTGLTHRKQQGEED

SEQ ID NO: 6439 - DNA, 462 bp, Alloiococcus otitidis
  CDS (112)..(459)
aacacaacaatagtaaccgagccggtatttttcttggcaataatggtaatgtttacattcggaacacagaagggacgtacaacccagttaatccaaacttcaactagaaggatgattaagatggaattaaggaaaattgtcgatgccaacaactgcttaaacaagctactagagaaaaagttatcgcctcaaacatcttttaaaatgattcgagcgaagaaagatttagagccatatgtcgaaagtgcggtggagtctcttcagaaatacgccaaagaaattgaggatgaaccgccgcaaacgcagaaacagttaatcagccaggaagaaaacaaaatattagacgaagacgtggattacagctttaagcaacagctaacccttgatgacttgccggaaattgaaggctatgtcatcgaaggcattttacccttagtgaaggaggacgcacttgatgagtaa

SEQ ID NO: 6440 - protein, 116 aa, Alloiococcus otitidis
MIKMELRKIVDANNCLNKLLEKKLSPQTSFKMIRAKKDLEPYVESAVESLQKYAKEIEDEPPQTQKQLISQEENKILDEDVDYSFKQQLTLDDLPEIEGYVIEGILPLVKEDALDE

SEQ ID NO: 6441 - DNA, 1917 bp, Alloiococcus otitidis
  CDS (427)..(1914)
aaaggaggccacaaggtggaggttatcgttggcaaccagtctgttcctgttcgagaaggaccagacggacggcttcaagcgacttttagagccacggaagatacgaaccgggtcatcatccccagtgactgcattggcacccttcacgtggatgatatccagctagaagaaggccttagagccaccccgtacaccgagccgaaagtgtttgaaaatgatatttccggtatttttaaagatttacgagatttgaatttaaaaattgacgatactgaaaatggcttacaaacacaaattaaaattaatcaatcgggtttggaacaggaaattgaggacacgcaaaaagggtttgctagccgactcattgccacagctgatatttggcaatcccaactggaagatacagagcaaaacttgcgttcggctatgcaacagacatctgatagtttaatcaccctcattgaagataccgacgaagaaaactttagtcaaaccgtccagttaatcagcggccttcaatcaacagttgaggggcaattgcgcagtcaacaaacgcaactagaggggcttattgcttccaccgtgaagagtgctaccggggctgactccctcatttggcaaacattggaaagtcatggcgcacaaatcaccagcgcgcaaggagatattaatagtgtagaacaacgcgccaattcggctcattcccgtatttcagatgtggaaggcaatcaaattcaaatcacgcaaaccgttgacgctttagatagtcatatcagcaatgtaaacggggatgtgtcccgtctcactcaaactgtgaacggcttaagctatgatgtccataacgcaaacggaacgcttaaaacggaaatccggaacctcgcaggccaaattgattcgaaagttagccgaggcgaaatggactcgatcattcgcagttccggcgatagcatctggttggcggttggcaaccgcgtggaaaacgtggcgcaaaacagcaagatgaacggggaagatattgtttctgaaatcaacatctccccaagcggtgtgcgtattgccggcgaaaaccttcatgtgtcggctcaaaccgttattgataatggcgtgatcaccaataacatgctagccaataatatcagtgctaacaagattacgtcaggtgaactcaacgccaatcaagtccgcattgttaacctagacgtcaatagtttgactgggaacaaaggccgatttgttcaactcggtattcagggattaaaccggaacattgacttaaacgggcaaggccttcacatttaccgtaacgacgggtcattagctaatctgctatccgaagatggtatcgaattctggaaggacggtcaagaacatggccaaatgagtgttttaagagctgttgatgaaggtggaatctttcagaataaatattcagtttcattgggtgctgaacatgaagcctatgtcggtttgtcttttcgcccacaaggaagcaatcaattctaccgagctttaggtgtagatggtcaaacgggacgtattttcatggacaatttacacccatccccgtctatcccaggcggtcttaaatttacgtatgctgtagacgaaattggaaaagacggtattcgagttaattatcaatatggcggggacccaacgaatggtggccttttagttacttcagaaggcgatgtagaggtcataggacaaaacttattgctcgatacatggcttgtcaaacatagcactagtggcaacggactaagactaaaagaagggaaggtcggcgatgttcaaggtctgtttttagaacacaacaatagtaaccgagccggtatttttcttggcaataatggtaatgtttacattcggaacacagaagggacgtacaacccagttaatccaaacttcaactag

SEQ ID NO: 6442 - protein, 496 aa, Alloiococcus otitidis
MQQTSDSLITLIEDTDEENFSQTVQLISGLQSTVEGQLRSQQTQLEGLIASTVKSATGADSLIWQTLESHGAQITSAQGDINSVEQRANSAHSRISDVEGNQIQITQTVDALDSHISNVNGDVSRLTQTVNGLSYDVHNANGTLKTEIRNLAGQIDSKVSRGEMDSIIRSSGDSIWLAVGNRVENVAQNSKMNGEDIVSEINISPSGVRIAGENLHVSAQTVIDNGVITNNMLANNISANKITSGELNANQVRIVNLDVNSLTGNKGRFVQLGIQGLNRNIDLNGQGLHIYRNDGSLANLLSEDGIEFWKDGQEHGQMSVLRAVDEGGIFQNKYSVSLGAEHEAYVGLSFRPQGSNQFYRALGVDGQTGRIFMDNLHPSPSIPGGLKFTYAVDEIGKDGIRVNYQYGGDPTNGGLLVTSEGDVEVIGQNLLLDTWLVKHSTSGNGLRLKEGKVGDVQGLFLEHNNSNRAGIFLGNNGNVYIRNTEGTYNPVNPNFN

SEQ ID NO: 6443 - DNA, 1917 bp, Alloiococcus otitidis; identical to SEQ ID NO: 6441
  CDS (250)..(1914)

SEQ ID NO: 6444 - protein, 555 aa, Alloiococcus otitidis
MNLKIDDTENGLQTQIKINQSGLEQEIEDTQKGFASRLIATADIWQSQLEDTEQNLRSAMQQTSDSLITLIEDTDEENFSQTVQLISGLQSTVEGQLRSQQTQLEGLIASTVKSATGADSLIWQTLESHGAQITSAQGDINSVEQRANSAHSRISDVEGNQIQITQTVDALDSHISNVNGDVSRLTQTVNGLSYDVHNANGTLKTEIRNLAGQIDSKVSRGEMDSIIRSSGDSIWLAVGNRVENVAQNSKMNGEDIVSEINISPSGVRIAGENLHVSAQTVIDNGVITNNMLANNISANKITSGELNANQVRIVNLDVNSLTGNKGRFVQLGIQGLNRNIDLNGQGLHIYRNDGSLANLLSEDGIEFWKDGQEHGQMSVLRAVDEGGIFQNKYSVSLGAEHEAYVGLSFRPQGSNQFYRALGVDGQTGRIFMDNLHPSPSIPGGLKFTYAVDEIGKDGIRVNYQYGGDPTNGGLLVTSEGDVEVIGQNLLLDTWLVKHSTSGNGLRLKEGKVGDVQGLFLEHNNSNRAGIFLGNNGNVYIRNTEGTYNPVNPNFN

SEQ ID NO: 6445 - DNA, 1917 bp, Alloiococcus otitidis; identical to SEQ ID NO: 6441
  CDS (16)..(1914)

SEQ ID NO: 6446 - protein, 633 aa, Alloiococcus otitidis
MEVIVGNQSVPVREGPDGRLQATFRATEDTNRVIIPSDCIGTLHVDDIQLEEGLRATPYTEPKVFENDISGIFKDLRDLNLKIDDTENGLQTQIKINQSGLEQEIEDTQKGFASRLIATADIWQSQLEDTEQNLRSAMQQTSDSLITLIEDTDEENFSQTVQLISGLQSTVEGQLRSQQTQLEGLIASTVKSATGADSLIWQTLESHGAQITSAQGDINSVEQRANSAHSRISDVEGNQIQITQTVDALDSHISNVNGDVSRLTQTVNGLSYDVHNANGTLKTEIRNLAGQIDSKVSRGEMDSIIRSSGDSIWLAVGNRVENVAQNSKMNGEDIVSEINISPSGVRIAGENLHVSAQTVIDNGVITNNMLANNISANKITSGELNANQVRIVNLDVNSLTGNKGRFVQLGIQGLNRNIDLNGQGLHIYRNDGSLANLLSEDGIEFWKDGQEHGQMSVLRAVDEGGIFQNKYSVSLGAEHEAYVGLSFRPQGSNQFYRALGVDGQTGRIFMDNLHPSPSIPGGLKFTYAVDEIGKDGIRVNYQYGGDPTNGGLLVTSEGDVEVIGQNLLLDTWLVKHSTSGNGLRLKEGKVGDVQGLFLEHNNSNRAGIFLGNNGNVYIRNTEGTYNPVNPNFN

SEQ ID NO: 6447 - DNA, 351 bp, Alloiococcus otitidis
  CDS (7)..(348)
gtgcttatgtatcagaatatttatattaacggtcaatccgttcaacgcgtcattagcaacggccaaacgatttggtcgaaagtacccgattctttcattacagagactgaggttgcaacgcctgatgtcgattttggctcaactttcatttatttaattgatcctttgccagagggtacgcaaccgtctgatatcgattatattgatattgaatattcaggccgtattagcggggatgaagtttcggccgttctggataatggcctaacccttcaactaagtggaagtttaagtgaccacaatctcaatccaatcgaagcaggcgaaaccgttgtagtccaatttaaatag

SEQ ID NO: 6448 - protein, 114 aa, Alloiococcus otitidis
MYQNIYINGQSVQRVISNGQTIWSKVPDSFITETEVATPDVDFGSTFIYLIDPLPEGTQPSDIDYIDIEYSGRISGDEVSAVLDNGLTLQLSGSLSDHNLNPIEAGETVVVQFK

SEQ ID NO: 6449 - DNA, 351 bp, Alloiococcus otitidis; identical to SEQ ID NO: 6447
  CDS (1)..(348)

SEQ ID NO: 6450 - protein, 116 aa, Alloiococcus otitidis
MLMYQNIYINGQSVQRVISNGQTIWSKVPDSFITETEVATPDVDFGSTFIYLIDPLPEGTQPSDIDYIDIEYSGRISGDEVSAVLDNGLTLQLSGSLSDHNLNPIEAGETVVVQFK

SEQ ID NO: 6451 - DNA, 1440 bp, Alloiococcus otitidis
  CDS (1)..(1437)
atggttgaaacgctaaaaggacgtgtcaagcaagtcaccaaaacagaagaagaatggttggcgagtgacattgtcttactggaaggcgaaattggcgttgccagtgacacacaagttattaaagttggcgatggccaaaagaaatggaaagacctgaaaagtcaccaagggaagcgaggaccgaaaggcgagccatttgagtatgaggactttacacccgcacagctagctgccttaaaaggccctaaaggtgacaaaggcgaaaagggcgaacaaggtgactccattcaatgggtccgccttgacgatgaagacctccacgtgaagctagaaggccagactgaacagaatttgggccgggttaaaggcgaaccattcacgtatgaagattttacaccagcccaactggctcaactccaagggcctgaaggggatcgcgggccgcaaggtgagcgtggtccaagaggccccaaaggcgaaccttttgaatatgacgatctgaccgaagaacaaaagattgaaatttccaatgctggtatagacctatccgaatacgtcaaagaagaagacttggacgactttgcctcacaatcagctttagtggaaggattcgctagcttggatagtaagattgagagcaaggctgacaaggatcacaatcatagcctttatgatgtgataggattgccgagtcagttggatagtaaagctagtcaatccgacttggccaacattgacattggggctagcgccagcgacctagcacgattagaagaaaaagttgacacaaaagcgactaaagcaagagccaatgatgatggcgaaattcagtactataattcagaagattacatctggcaaaccgatgattcgagcgaacaagtggcgctcaaagaccacacgcacccgatttcagacatcaccggcttacaagctagcttagataataaggctaacgtggacgacttagacgatttaggcattgatttaaccagttacgccacaaaatctgacctagctagcaaatctgataaaggacacagccacagcatgagcgatgtggttggcttagaaaatgaattagacaaaaaggttaacgtcgttcgtgttgcagacgatggccgagtcatttatcgaagaagtgatgaccccgatgataattggaaaaattggaacgatgaaaacaaggttgctttgaaagaccacacgcatgccatagcagatgttcgaggattgcgaagcgagctcaataatattagtcaaagttcgcaaaacaattttcaggatatcgcttttcttcttagtgaaacttctcaacttcaatcacaggtgggcaaagttcaagacgcccaaacaggtgattggttagaagttcaaattgtagggccgggtcaagtccctgctaatacgtctggcaaaatcgtgtttgagaaagagtag

SEQ ID NO: 6452 - protein, 479 aa, Alloiococcus otitidis
MVETLKGRVKQVTKTEEEWLASDIVLLEGEIGVASDTQVIKVGDGQKKWKDLKSHQGKRGPKGEPFEYEDFTPAQLAALKGPKGDKGEKGEQGDSIQWVRLDDEDLHVKLEGQTEQNLGRVKGEPFTYEDFTPAQLAQLQGPEGDRGPQGERGPRGPKGEPFEYDDLTEEQKIEISNAGIDLSEYVKEEDLDDFASQSALVEGFASLDSKIESKADKDHNHSLYDVIGLPSQLDSKASQSDLANIDIGASASDLARLEEKVDTKATKARANDDGEIQYYNSEDYIWQTDDSSEQVALKDHTHPISDITGLQASLDNKANVDDLDDLGIDLTSYATKSDLASKSDKGHSHSMSDVVGLENELDKKVNVVRVADDGRVIYRRSDDPDDNWKNWNDENKVALKDHTHAIADVRGLRSELNNISQSSQNNFQDIAFLLSETSQLQSQVGKVQDAQTGDWLEVQIVGPGQVPANTSGKIVFEKE

SEQ ID NO: 6453 - DNA, 243 bp, Alloiococcus otitidis
  CDS (4)..(240)
tccttgtcagccttgctctcaatcttactatccaagctagcgaatccttccactaaagctgattgtgaggcaaagtcgtccaagtcttcttctttgacgtattcggataggtctataccagcattggaaatttcaatcttttgttcttcggtcagatcgtcatattcaaaaggttcgcctttggggcctcttggaccacgctcaccttgcggcccgcgatccccttcaggcccttggagttga

SEQ ID NO: 6454 - protein, 79 aa, Alloiococcus otitidis
MSALLSILLSKLANPSTKADCEAKSSKSSSLTYSDRSIPALEISIFCSSVRSSYSKGSPLGPLGPRSPCGPRSPSGPWS

SEQ ID NO: 6455 - DNA, 291 bp, Alloiococcus otitidis
  CDS (25)..(288)
agcttgaaagaagtcaccatcaagatgctaccaacgcaagacgaatttccagaagtgaccgacaccacgacaaccagcccacacaaactagaggtttaccccgactattatcaaaccgaaatcacgggcgattggtatcaaacggaaacgttgcccgtcaaagctttaaaggaaatcaaccgcgtggatgtcagcttagcttatcgagaaatattagaagatgatccaaatagtgaccgactctttcaattctcaactgatccagaccttatatggaagggggaaatttag

SEQ ID NO: 6456 - protein, 88 aa, Alloiococcus otitidis
MLPTQDEFPEVTDTTTTSPHKLEVYPDYYQTEITGDWYQTETLPVKALKEINRVDVSLAYREILEDDPNSDRLFQFSTDPDLIWKGEI

SEQ ID NO: 6457 - DNA, 291 bp, Alloiococcus otitidis; identical to SEQ ID NO: 6455
  CDS (4)..(288)

SEQ ID NO: 6458 - protein, 95 aa, Alloiococcus otitidis
MKEVTIKMLPTQDEFPEVTDTTTTSPHKLEVYPDYYQTEITGDWYQTETLPVKALKEINRVDVSLAYREILEDDPNSDRLFQFSTDPDLIWKGEI

SEQ ID NO: 6459 - DNA, 1866 bp, Alloiococcus otitidis
  CDS (4)..(1863)
ggcatggcaatttatttctttgatcacaatcaagacttgctaaaaattgtgccagatacggctaccttttcagccattcaaacgcaagaattgccggatgatggtggccttttaaaagacaccctagaagtgacggtgcaaggcgataaacgactcacaaacgcccaatacatggccgtgaagtcttaccgtggaaatgagcaagcctttgatatgtatcaaattgtcaacgaaacaaccccagatgacaccatgaaatttgtcggcgttcaactagcagtgtatgaactcgaagggcaaatcgttaaagactaccgtccacgcggtagaggcttagcggaagtgctaggcaatcttcttaagcacaccgattggcaacctggctatatggacgacggtttaccaagtgttaccacgcaattttactttaccagtgttaaggaagccttgaagcacgtgcaagacctgaccggcgtggagtttgcgtttaaagttgaaatggctggccaatccattacggacaaatgggttgaagcttatcacgaaatgggccggaaaacgcaaaaacgatactcgtacgggtccaatgccttaactgttgtgcgggagacccaacgcgatgagatttataccgctttgattggacgcggcaaaggtgaacagacatcaagcgacgaagataacgacagtgggcaagctggctatgggcgaaaactaacgttcgccggcgttgaatggtccaccgcaaacggagacccgctagacaaaccaagaggccaaatttacttagaagacccaaccgcaaccgatcaatttggcatcccatatattgaaggaaagaaagcgccccgtattgggatcgtcggttttgacgacgaagaagatcctgaacgcctattagaactcacttatgagcaactaaaagtgcaagcccgcccgaaagttctctttaaagccaccgtggccaatattggtgcaacgggtattggggacactgttacgatccaccgtcatgatttagatattcactaccaaacacgtgttcggaaagttgtgcgaaataagttaaatgacgataaaacccaagtggagttaggagacgttgtttatactccaagtacaaaacgacaagccaatattcgcaacatcgaacaaaacgtatccgatattcaagaaagccaagcgaacctatcctacacccttctatcagctgatggcttcaatagcatcacctatggcaatgttgaacctgaacgcaagcgaaccggggacctatggtatcgtgatcacccttcaataccaggggaaacccaattattgatctggaatggcgaagcttgggaactgctgattgatgaagccgcaatcaaccaaggcctaaaagaagcggagcaaaaactccaagcatttgagtacaagtggtcacaactccaaaagcggaatgaagaagagctagataattttgaagactacttggaagccattcggaacgatattgatgaccttgctgaaaacggcattgatactgacaaaatcgacaaagccattcgccaagccggtttcaatcaacggcaaattaatattattgaaaaagaactagcggaaacgtcagacagcgcagcattagcgcttgacatgattggaagcgatggtgttactcgatacagccgtaaccgtgtggaaggtgacacaagcgggaaaatcgagtttcgtgacgatccaatcgaggtttaccacaatggcccaggcttccaagccggccagctatataccattagttttgacgcctattgtgaaccgatggagaaaaacactgttgtctttaacttggacgcacccgataaggaaggcggcgatgaagcttga

SEQ ID NO: 6460 - protein, 620 aa, Alloiococcus otitidis
MAIYFFDHNQDLLKIVPDTATFSAIQTQELPDDGGLLKDTLEVTVQGDKRLTNAQYMAVKSYRGNEQAFDMYQIVNETTPDDTMKFVGVQLAVYELEGQIVKDYRPRGRGLAEVLGNLLKHTDWQPGYMDDGLPSVTTQFYFTSVKEALKHVQDLTGVEFAFKVEMAGQSITDKWVEAYHEMGRKTQKRYSYGSNALTVVRETQRDEIYTALIGRGKGEQTSSDEDNDSGQAGYGRKLTFAGVEWSTANGDPLDKPRGQIYLEDPTATDQFGIPYIEGKKAPRIGIVGFDDEEDPERLLELTYEQLKVQARPKVLFKATVANIGATGIGDTVTIHRHDLDIHYQTRVRKVVRNKLNDDKTQVELGDVVYTPSTKRQANIRNIEQNVSDIQESQANLSYTLLSADGFNSITYGNVEPERKRTGDLWYRDHPSIPGETQLLIWNGEAWELLIDEAAINQGLKEAEQKLQAFEYKWSQLQKRNEEELDNFEDYLEAIRNDIDDLAENGIDTDKIDKAIRQAGFNQRQINIIEKELAETSDSAALALDMIGSDGVTRYSRNRVEGDTSGKIEFRDDPIEVYHNGPGFQAGQLYTISFDAYCEPMEKNTVVFNLDAPDKEGGDEA

SEQ ID NO: 6461 - DNA, 774 bp, Alloiococcus otitidis
  CDS (13)..(771)
aggaggcctagcatggattacaccagtttaaccgatcaatcagatcaaccagcgggcctatcttctgtagcgcttagcctcaacggccaaaccttagaccaagtgattgaaggctaccgaaccttaaaagtgagcgggcgggaaacactcagtcaagagatccaacccgaagaagttccaaccggtacattggtgctaaataatcgtttaccagcccgtgaaatcacagtgacctataatttaaaagctaatgacggaaccacgctccagcaacgctttaaaaagctaagaaagcaccttacgggcaatttaatcataagctttcgtgatgaaccaaaaacctattaccttggtctactaagcgaaatggaagccccgccagatcatacgaatgataaagtgggaacctttgttctgtattgccctgatccttacaagtttggcccaatccaaaccactagcggggaagtgacgatcgatactttttatccaaccccgcccgaacagatcaaggtttccgtgaccagcaccacaaacgaactagaagtaactgatggcaactataccattactgctacagggacatttaacggtgggaacgacgcgattttccgctttgatcgtgaagccatgacgttgacggtagctggcgaagaggcaacctatatggtcgatttaaatagtgattttgaaaactttcgactgacgcaagggaacaccgttcgatgtccacaggggacggtcgaattaaaagctagagaaaggtggctataa

SEQ ID NO: 6462 - protein, 253 aa, Alloiococcus otitidis
MDYTSLTDQSDQPAGLSSVALSLNGQTLDQVIEGYRTLKVSGRETLSQEIQPEEVPTGTLVLNNRLPAREITVTYNLKANDGTTLQQRFKKLRKHLTGNLIISFRDEPKTYYLGLLSEMEAPPDHTNDKVGTFVLYCPDPYKFGPIQTTSGEVTIDTFYPTPPEQIKVSVTSTTNELEVTDGNYTITATGTFNGGNDAIFRFDREAMTLTVAGEEATYMVDLNSDFENFRLTQGNTVRCPQGTVELKARERWL

SEQ ID NO: 6463 - DNA, 2643 bp, Alloiococcus otitidis
  CDS (4)..(2640)
ccaatggcttttgggaaaaatttcgatgtccaagcaacattaagggctgaaacaggtccctttaaccgagccatgaagggcgcttctaatgccataaaaggcctaaagaatgaagcaaacagtttaaccagtattggtaatgctgtttccggcgttgggaaagccttaaccgctggggttacggtgccagtagctggagcaattggggccagtgttgccttaggggcttccttcgaagaacaaatgtccacagtgggggcggttactaatgcttctgcttctgaaatggaagctttggagaattccgcccgtgaaatgggacaaacgactcgttatagtgcaactgaagcagcgggcgcacaagaaaacttagctcgtgcaggttttaacactagtgaaattatggatgctctaggatctactttagacctagctacctctggctctatttcactggatgaagcatctagtatcaccgctcggactattcgagggtttggcctggaagcttctgacgcttctcgtgtggcggatgtactggccaaaacagctgccggttctaatacaactgtttctggcttaggcgaaacttttaaatatgttgctcccgtggcttccggtttggggctaggttttgaagaagtagcagcagctgccggtatcatgggtgatgctggtattgaagccagccaagccggtagggttttgaaccgtggactactcaacttagcggccccaaccgctcaacaaaaagccttgatggatgaactaggcctttccttctttgacgctaacggtcaaatgaaaccgatgaaagaaattgtgggagagctagaaactggcctagctggtatgtcggacgaacagaaaacagctgctttagccactttatttggatcgcacgctgtttctggttggaccgcattggtagatgctggttctgatgctttaggtgaatttcaaaacggacttgaaaattccactggttttgcggaggaatttgctcgtcaagtagaagacaacctatcgggttcctttagagaatttaaatcatctttgggagaagttggcttaaccatatttgatttaatcgaagggcctttaagaagtttaattgatagtgcaacagaagcgttagatgctttccttgaacttgatgaagggacccaaaaaaatattctaaaaatgattgggttagcggctgctattgggccggtcctttggattttaggtaaacttttaatagttcttccacacttggccgccgggctttcgctggttaaaggtggcgtcaccaaattagctggtgcttttcaagctggtggtgcaatcagtgccttattcggcaaagtacttggcctgttaaaagcggcatttgcttttctcattagcccaattggcctcgttatcgccgccattgcaatctttattggtgttctaatttatctttacaacacaaatgaaacggtgcgcgaattcatcgtcaccgcgtgggaaaacattcaggaaaccattggcggagcggctgaagccatctctgatttcattagccaagcttgggaatatgtcaaagaaaaaacagtcgaaatatggaacaatatcatagattggctatctgaaaaatgggaaaatctgaaaaccaaagtgatcgaggtctttaccggtattaaagacaagattaccgaagcttgggacagagttaaagaaaaaacgtccgagatatggaacagtatcaaagactggctatctgaaaaatgggaaaatctgaaaaccaaagtgatcgaggtctttactggtattaaagataagatcaccgaagcttgggacaaagtcaaagataaaacgtctgaaatttggaacaatatcaccacttggttatccgataagtgggaaggtttaaaagaaacggtcagtgatattttcggtagtatcaagaacaaagtgtttgaaatttggagcaaaatcaaacgcaaaacaagagaaatttggaacaatatcaccgagaccatttccgattttctggacaccatttttagtacctttgaagatatctttggcgatttattcggcgttgtggtcgatgcctttaatgatgtggtcgaagctgttagcgacggcatgagtgacgccttagatgctgttaccgacttctttggcgatttcgtcgatgctggtaaaaatattgttagcagtattgccgacgggattaaaagtgccgttggtagggttaccgatgcgattggggatgtcgttggtgctgttaaggacttcctcccattctcaccacctaaagacaaatccagtccactggttggcattgaaaacaacaacatcgttggtcaaattgccaaaggcatcaaccgcgatgaagacaagctggctactgctacttcgagtgctttagatcgtgtgcaaggtattttaaaccagcgtcgattaaatgccaatctaggcttacgcaacgccgtggacaacgccaacgctcaagtcaacagtcacattcaccatgaattttcaaaccttgagttagacaaacaacctatgcaagtaaacttgtccattggtggccaaaactttactgcctttgtcgacaacatttcgcaagaacaaggacgtcaaaccgacttagaactacaattttaa

SEQ ID NO: 6464 - protein, 879 aa, Alloiococcus otitidis
MAFGKNFDVQATLRAETGPFNRAMKGASNAIKGLKNEANSLTSIGNAVSGVGKALTAGVTVPVAGAIGASVALGASFEEQMSTVGAVTNASASEMEALENSAREMGQTTRYSATEAAGAQENLARAGFNTSEIMDALGSTLDLATSGSISLDEASSITARTIRGFGLEASDASRVADVLAKTAAGSNTTVSGLGETFKYVAPVASGLGLGFEEVAAAAGIMGDAGIEASQAGRVLNRGLLNLAAPTAQQKALMDELGLSFFDANGQMKPMKEIVGELETGLAGMSDEQKTAALATLFGSHAVSGWTALVDAGSDALGEFQNGLENSTGFAEEFARQVEDNLSGSFREFKSSLGEVGLTIFDLIEGPLRSLIDSATEALDAFLELDEGTQKNILKMIGLAAAIGPVLWILGKLLIVLPHLAAGLSLVKGGVTKLAGAFQAGGAISALFGKVLGLLKAAFAFLISPIGLVIAAIAIFIGVLIYLYNTNETVREFIVTAWENIQETIGGAAEAISDFISQAWEYVKEKTVEIWNNIIDWLSEKWENLKTKVIEVFTGIKDKITEAWDRVKEKTSEIWNSIKDWLSEKWENLKTKVIEVFTGIKDKITEAWDKVKDKTSEIWNNITTWLSDKWEGLKETVSDIFGSIKNKVFEIWSKIKRKTREIWNNITETISDFLDTIFSTFEDIFGDLFGVVVDAFNDVVEAVSDGMSDALDAVTDFFGDFVDAGKNIVSSIADGIKSAVGRVTDAIGDVVGAVKDFLPFSPPKDKSSPLVGIENNNIVGQIAKGINRDEDKLATATSSALDRVQGILNQRRLNANLGLRNAVDNANAQVNSHIHHEFSNLELDKQPMQVNLSIGGQNFTAFVDNISQEQGRQTDLELQF

SEQ ID NO: 6465 - DNA, 270 bp, Alloiococcus otitidis
  CDS (1)..(267)
atgctgttaccgacttctttggcgatttcgtcgatgctggtaaaaatattgttagcagtattgccgacgggattaaaagtgccgttggtagggttaccgatgcgattggggatgtcgttggtgctgttaaggacttcctcccattctcaccacctaaagacaaatccagtccactggttggcattgaaaacaacaacatcgttggtcaaattgccaaaggcatcaaccgcgatgaagacaagctggctactgctacttcgagtgctttag

SEQ ID NO: 6466 - protein, 89 aa, Alloiococcus otitidis
MLLPTSLAISSMLVKILLAVLPTGLKVPLVGLPMRLGMSLVLLRTSSHSHHLKTNPVHWLALKTTTSLVKLPKASTAMKTSWLLLLRVL

SEQ ID NO: 6467 - DNA, 837 bp, Alloiococcus otitidis
  CDS (7)..(834)
ccaacgatgttgttgttttcaatgccaaccagtggactggatttgtctttaggtggtgagaatgggaggaagtccttaacagcaccaacgacatccccaatcgcatcggtaaccctaccaacggcacttttaatcccgtcggcaatactgctaacaatatttttaccagcatcgacgaaatcgccaaagaagtcggtaacagcatctaaggcgtcactcatgccgtcgctaacagcttcgaccacatcattaaaggcatcgaccacaacgccgaataaatcgccaaagatatcttcaaaggtactaaaaatggtgtccagaaaatcggaaatggtctcggtgatattgttccaaatttctcttgttttgcgtttgattttgctccaaatttcaaacactttgttcttgatactaccgaaaatatcactgaccgtttcttttaaaccttcccacttatcggataaccaagtggtgatattgttccaaatttcagacgttttatctttgactttgtcccaagcttcggtgatcttatctttaataccagtaaagacctcgatcactttggttttcagattttcccatttttcagatagccagtctttgatactgttccatatctcggacgttttttctttaactctgtcccaagcttcggtaatcttgtctttaataccggtaaagacctcgatcactttggttttcagattttcccatttttcagatagccaatctatgatattgttccatatttcgactgttttttctttgacatattcccaagcttggctaatgaaatcagagatggcttcagccgctccgccaatggtttcctga

SEQ ID NO: 6468 - protein, 276 aa, Alloiococcus otitidis
MLLFSMPTSGLDLSLGGENGRKSLTAPTTSPIASVTLPTALLIPSAILLTIFLPASTKSPKKSVTASKASLMPSLTASTTSLKASTTTPNKSPKISSKVLKMVSRKSEMVSVILFQISLVLRLILLQISNTLFLILPKISLTVSFKPSHLSDNQVVILFQISDVLSLTLSQASVILSLIPVKTSITLVFRFSHFSDSQSLILFHISDVFSLTLSQASVILSLIPVKTSITLVFRFSHFSDSQSMILFHISTVFSLTYSQAWLMKSEMASAAPPMVS

SEQ ID NO: 6469 - DNA, 306 bp, Alloiococcus otitidis
  CDS (19)..(303)
aaagcaccagctaatttggtgacgccacctttaaccagcgaaagcccggcggccaagtgtggaagaactattaaaagtttacctaaaatccaaaggaccggcccaatagcagccgctaacccaatcatttttagaatatttttttgggtcccttcatcaagttcaaggaaagcatctaacgcttctgttgcactatcaattaaacttcttaaaggcccttcgattaaatcaaatatggttaagccaacttctcccaaagatgatttaaattctctaaaggaacccgataggttgtcttctacttga

SEQ ID NO: 6470 - protein, 95 aa, Alloiococcus otitidis
MTPPLTSESPAAKCGRTIKSLPKIQRTGPIAAANPIIFRIFFWVPSSSSRKASNASVALSIKLLKGPSIKSNMVKPTSPKDDLNSLKEPDRLSST

SEQ ID NO: 6471 - DNA, 306 bp, Alloiococcus otitidis; identical to SEQ ID NO: 6469
  CDS (16)..(303)

SEQ ID NO: 6472 - protein, 96 aa, Alloiococcus otitidis
MVTPPLTSESPAAKCGRTIKSLPKIQRTGPIAAANPIIFRIFFWVPSSSSRKASNASVALSIKLLKGPSIKSNMVKPTSPKDDLNSLKEPDRLSST

SEQ ID NO: 6473 - DNA, 411 bp, Alloiococcus otitidis
  CDS (19)..(408)
gcggttggggccgctaagttgagtagtccacggttcaaaaccctaccggcttggctggcttcaataccagcatcacccatgataccggcagctgctgctacttcttcaaaacctagccccaaaccggaagccacgggagcaacatatttaaaagtttcgcctaagccagaaacagttgtattagaaccggcagctgttttggccagtacatccgccacacgagaagcgtcagaagcttccaggccaaaccctcgaatagtccgagcggtgatactagatgcttcatccagtgaaatagagccagaggtagctaggtctaaagtagatcctagagcatccataatttcactagtgttaaaacctgcacgagctaagttttcttgtgcgcccgctgcttcagttgcactataa

SEQ ID NO: 6474 - protein, 130 aa, Alloiococcus otitidis
MSSPRFKTLPAWLASIPASPMIPAAAATSSKPSPKPEATGATYLKVSPKPETVVLEPAAVLASTSATREASEASRPNPRIVRAVILDASSSEIEPEVARSKVDPRASIISLVLKPARAKFSCAPAASVAL

SEQ ID NO: 6475 - DNA, 420 bp, Alloiococcus otitidis
  CDS (103)..(417)
aatgggaaagagttcaaccttgagacgggccgaaaaagcacagaaacggctcaatcaagcgaacaaccccaacggagtataaaagaactgaaggccatcttgatggcccggcatgatctctctcctgtggaagctggacgtacaacgctaaaggagtttgacgtatacgcgcttagttatagcttgaagatgcaagaatggcgctatcgtgcttccttcctcgcgtggcaaaatcaagccgtgcaagcgaccaaaggaaaaggcaaaaatgtccggccggctttcaaaaagtttgaagacttttacgattataccaaagactttgaacaggtctttgacccgccagaaccaaccgaaccaaaacaaacggaaagcttggcggacttgaatatgaaattaaacgcgaaaggaagggggtaa

SEQ ID NO: 6476 - protein, 105 aa, Alloiococcus otitidis
MARHDLSPVEAGRTTLKEFDVYALSYSLKMQEWRYRASFLAWQNQAVQATKGKGKNVRPAFKKFEDFYDYTKDFEQVFDPPEPTEPKQTESLADLNMKLNAKGRG

SEQ ID NO: 6477 - DNA, 420 bp, Alloiococcus otitidis; identical to SEQ ID NO: 6475
  CDS (100)..(417)

SEQ ID NO: 6478 - protein, 106 aa, Alloiococcus otitidis
MMARHDLSPVEAGRTTLKEFDVYALSYSLKMQEWRYRASFLAWQNQAVQATKGKGKNVRPAFKKFEDFYDYTKDFEQVFDPPEPTEPKQTESLADLNMKLNAKGRG

SEQ ID NO: 6479 - DNA, 444 bp, Alloiococcus otitidis
  CDS (82)..(441)
cgagtcgtttgtcccatttcacgggcggaattctccaaagcttccatttcagaagcagaagcattagtaaccgcccccactgtggacatttgttcttcgaaggaagcccctaaggcaacactggccccaattgctccagctactggcaccgtaaccccagcggttaaggctttcccaacgccggaaacagcattaccaatactggttaaactgtttgcttcattctttaggccttttatggcattagaagcgcccttcatggctcggttaaagggacctgtttcagcccttaatgttgcttggacatcgaaatttttcccaaaagccattggttacccccttcctttcgcgtttaatttcatattcaagtccgccaagctttccgtttgttttggttcggttggttctggcgggtcaaagacctgttcaaagtctttggtataa

SEQ ID NO: 6480 - protein, 120 aa, Alloiococcus otitidis
MDICSSKEAPKATLAPIAPATGTVTPAVKAFPTPETALPILVKLFASFFRPFMALEAPFMARLKGPVSALNVAWTSKFFPKAIGYPLPFAFNFIFKSAKLSVCFGSVGSGGSKTCSKSLV

SEQ ID NO: 6481 - DNA, 393 bp, Alloiococcus otitidis
  CDS (10)..(390)
gaggacaagatgaaggtcaccgtcaataataaagattacgatttatactttggcttagacttcctagatgaaattgaacgcaaacactcgccgaccatggaagcggaaggccaagaattcaaaattggcactggtgggcttccgattttagaagccaaaatgaaccagtacagtcaatctgctttggctgatgtgttggtagccggcaccaccaccggccctaaaaagttaaaccgtcgtgagattgaaacgcactttaacaatctaactgatgatgagttctttcagttttacgatgatgtccttgatgaaatgggaaagagttcaaccttgagacgggccgaaaaagcacagaaacggctcaatcaagcgaacaaccccaacggagtataa

SEQ ID NO: 6482 - protein, 127 aa, Alloiococcus otitidis
MKVTVNNKDYDLYFGLDFLDEIERKHSPTMEAEGQEFKIGTGGLPILEAKMNQYSQSALADVLVAGTTTGPKKLNRREIETHFNNLTDDEFFQFYDDVLDEMGKSSTLRRAEKAQKRLNQANNPNGV

SEQ ID NO: 6483 - DNA, 600 bp, Alloiococcus otitidis
  CDS (13)..(597)
aggagaataaagatggatcaattaatttctggtaaaaatgtcttagtctttttaagaccttacaaaaaccgtgacgaagaagatggaacccgtattcggttccaatccgaagtgaccttatccgaagaaaccgaagtcgaagggaccgccaccacggacggtatttttaatacggtttccgacggcgaaagcacgattgagtttaactcgcttgcgtacatttccgacaaagaaacaaccgaaggctggcaccaactcaaacgctaccgtcgaaaccaagagtatatggaagcctggattgtgtacaacgttggacgataccaacgggccgaatatgccaccggttacttgaactcttttgaactatcagcggacgcagaaggacaggttgaattgtcttactcattcaccattgatggcaacccaattgaaggtgtcgaaagcttgacccaagaacaactacaactcgttaacggcgaccaagaataccgttccgttgttggggaagacgccgacaattccgaggatgaagacgacgatcaacccaccatcccaggcaataacgacgaaatggataccccgactattccagggcaataa

SEQ ID NO: 6484 - protein, 195 aa, Alloiococcus otitidis
MDQLISGKNVLVFLRPYKNRDEEDGTRIRFQSEVTLSEETEVEGTATTDGIFNTVSDGESTIEFNSLAYISDKETTEGWHQLKRYRRNQEYMEAWIVYNVGRYQRAEYATGYLNSFELSADAEGQVELSYSFTIDGNPIEGVESLTQEQLQLVNGDQEYRSVVGEDADNSEDEDDDQPTIPGNNDEMDTPTIPGQ

SEQ ID NO: 6485 - DNA, 444 bp, Alloiococcus otitidis
  CDS (55)..(441)
gttgcaacccatgctactcaaagacttaatggatgtcgtgagaggagcgtttgcatgacacctgctaatgctgtttttcgttatatttttgcgacagcacaaaacgtaacggacaacgtttatgactacttgccagatgctaacgcccattatccgtttatttacattggcgaagacgacaccgaacaagtcagcaacaccgatcgcgtggaagacgttgaacaaaccgtccacctctggggcaagcgcaccgatcgtaaccaattagatgactggctggaagccttgcgggctgaattgggacgtccacgtcgagcgtttgcgtattccttgaacccgcttgaccgtgcacactcaaccataccggacaacacaacaggggaaccgctattgcatcacgtgctagcggttcgttttcgtgctattgagagtaaaggagaataa

SEQ ID NO: 6486 - protein, 129 aa, Alloiococcus otitidis
MTPANAVFRYIFATAQNVTDNVYDYLPDANAHYPFIYIGEDDTEQVSNTDRVEDVEQTVHLWGKRTDRNQLDDWLEALRAELGRPRRAFAYSLNPLDRAHSTIPDNTTGEPLLHHVLAVRFRAIESKGE

SEQ ID NO: 6487 - DNA, 282 bp, Alloiococcus otitidis
  CDS (43)..(279)
cgcacccgtgaaagggtccgtccgcttgaaggaggtttcgccatgaagattgaaatggatctccaaggcgctgatgaattgatagatgtccttaaccgagctggcgggcaaacagcgaagcaagctaatcaagtggtacgcaataacgccgaaaaaggcatggccattgccaaacaaaaagcccctgtcgataccggctttttaaaggagaatattcgaaccgaatacaagcctcatgaagtcgtcattcacgcgcgggcggggtattccggttgtgcttga

SEQ ID NO: 6488 - protein, 79 aa, Alloiococcus otitidis
MKIEMDLQGADELIDVLNRAGGQTAKQANQVVRNNAEKGMAIAKQKAPVDTGFLKENIRTEYKPHEVVIHARAGYSGCA

SEQ ID NO: 6489 - DNA, 354 bp, Alloiococcus otitidis
  CDS (61)..(351)
atgaagaaccgtccggtcaagaacgacaagggcgggtggtcttttattaaaacaccgaacatgattgaactggtcttaggtgaggatcagccagctgaatttaatccggtaacgggcgagtatgacgagccgaaacccgatacccgccacgtaccctgcttagccaattacgtcacgcaagaagtcgtgtatgagcaatacggcaatcgtcaagatcgtattttagtggctcgctttttgcaagcccaaccgcctttctccaaagccttttacgacggtcggagttttaagccggttgaagccattgacgcacccgtgaaagggtccgtccgcttgaaggaggtttcgccatga

SEQ ID NO: 6490 - protein, 97 aa, Alloiococcus otitidis
MIELVLGEDQPAEFNPVTGEYDEPKPDTRHVPCLANYVTQEVVYEQYGNRQDRILVARFLQAQPPFSKAFYDGRSFKPVEAIDAPVKGSVRLKEVSP

SEQ ID NO: 6491 - DNA, 342 bp, Alloiococcus otitidis
  CDS (7)..(339)
aggctaatgcttcaaaaactccaacgtcgtttagagatttccgatgactcaccagaattagaggttctggaagacgtcttagaagacgcgcagagcgcttttaaagtcatcacagggacaaataccatcgacgaaaaatataactttatggtggtacaagtcgctgctcaactctacaaccgaagagggtccgaaggcatggaaagcgagaatgtggacggctatagcgtgaaatatgtagcgggcctgtatgatgagttttggcctattctggaacgtgacttcaagttaaatgaagaaccgtccggtcaagaacgacaagggcgggtggtcttttattaa

SEQ ID NO: 6492 - protein, 111 aa, Alloiococcus otitidis
MLQKLQRRLEISDDSPELEVLEDVLEDAQSAFKVITGTNTIDEKYNFMVVQVAAQLYNRRGSEGMESENVDGYSVKYVAGLYDEFWPILERDFKLNEEPSGQERQGRVVFY

SEQ ID NO: 6493 - DNA, 999 bp, Alloiococcus otitidis
  CDS (4)..(996)
tatatggctcaaacatttaaacccgataacgttctattgtccgacactttaggacgtgaagtttccgctcaaccatttaccaacgcgtttttaaatcaattggttagcacttctaagctgattcaactaggtgaacgcgtggacatgggcaatcagcgaattgtccgtcgtaatggtggcgttggagaattatctgatgcttactttgtcgacgaaggcgaaaaaatctcaaccgcaaaagttgaaggcagtgactacattttagaaaccaagaaaattggggttatccttcccgtctcggaagagtttctaaattacacctggagccaatactttagccaaattgtgccggtcattgccgacaagttcaataagaaaattgatggcgcagcattcttaggcctccacaacaacccctttggcaattctgttttagcccaagcacaggcttccggcaatattgtagctggtgacttgactgctgaaaacatctttgacttaggcgccaccactccaaacgaaccaactgcttttgttggtcaccgcaccctgaaccgggatcttagaacgatcacagacgctgacaatgtcaacggccgatttatttttgaacgcccaactagccagaatgggattggtgtcttggatagcttgccttaccacgcactccaattatctgatggtgaagattacccagatggaacccttctcactggtaactttaatggcttgaaatacggcgtgccaaacagtgctagcttacgcctcaaaattgcagaccaagcgactctatcaactgttcaaaacgctgataatgaaagcttaggcgatgttcacctctttgaacaagacttgcaagccctaagagccgtctttgaaattgccgtggctattccagaaggtgcgaaagactttgcggttcttcaacctcaagcgtccttgggcagagatgacgacgaagacaataaccctttaacccaaggtgaagcgggggagtag

SEQ ID NO: 6494 - protein, 331 aa, Alloiococcus otitidis
MAQTFKPDNVLLSDTLGREVSAQPFTNAFLNQLVSTSKLIQLGERVDMGNQRIVRRNGGVGELSDAYFVDEGEKISTAKVEGSDYILETKKIGVILPVSEEFLNYTWSQYFSQIVPVIADKFNKKIDGAAFLGLHNNPFGNSVLAQAQASGNIVAGDLTAENIFDLGATTPNEPTAFVGHRTLNRDLRTITDADNVNGRFIFERPTSQNGIGVLDSLPYHALQLSDGEDYPDGTLLTGNFNGLKYGVPNSASLRLKIADQATLSTVQNADNESLGDVHLFEQDLQALRAVFEIAVAIPEGAKDFAVLQPQASLGRDDDEDNNPLTQGEAGE

SEQ ID NO: 6495 - DNA, 567 bp, Alloiococcus otitidis
  CDS (16)..(564)
ggaaggattttaaacatggcagacgaagaacaaacccaagaccaaaaccaagcggaagaagaaaagactgttcaagtggcggaaatgaaacgccgtttggaaaaagaacaagataaataccaaaagcaaatcgacgaactcaaagaaaaccaggaagaagctgttaagaaagcgtacgagcaagcccaaaaagaagcgaagatgtccgccgatgaattcgccgactatcgtattaaagaaaccgagcgcaagcaagaagaagaacgacagaaatacgaagaccaaatcgcagaatatcagcggcgggaaaaacaacgggaaattcatgatgagtccattaacaagttggatgaactcaacattcccgtcaaccagtccacgcttgatttagtgcaagcagatagcttagacggcatgagtagccgggctgatgcattagcgaaggtgatcagtgccgtgaaaagcgagtacgctactagcaaaccgcccaaagtgagcggcggaactgaaactgatgacagcgatcaaaatatgtttgatattttagaccaagcgaaggagagataa

SEQ ID NO: 6496 - protein, 183 aa, Alloiococcus otitidis
MADEEQTQDQNQAEEEKTVQVAEMKRRLEKEQDKYQKQIDELKENQEEAVKKAYEQAQKEAKMSADEFADYRIKETERKQEEERQKYEDQIAEYQRREKQREIHDESINKLDELNIPVNQSTLDLVQADSLDGMSSRADALAKVISAVKSEYATSKPPKVSGGTETDDSDQNMFDILDQAKER

SEQ ID NO: 6497 - DNA, 378 bp, Alloiococcus otitidis
  CDS (61)..(375)
atcaagcgtggactggttgacgggaatgttgagttcatccaacttgttaatggactcatcatgaatttcccgttgtttttcccgccgctgatattctgcgatttggtcttcgtatttctgtcgttcttcttcttgcttgcgctcggtttctttaatacgatagtcggcgaattcatcggcggacatcttcgcttctttttgggcttgctcgtacgctttcttaacagcttcttcctggttttctttgagttcgtcgatttgcttttggtatttatcttgttctttttccaaacggcgtttcatttccgccacttgaacagtcttttcttcttccgcttggttttggtcttgggtttgttcttcgtctgccatgtttaa

SEQ ID NO: 6498 - protein, 105 aa, Alloiococcus otitidis
MNFPLFFPPLIFCDLVFVFLSFFFLLALGFFNTIVGEFIGGHLRFFLGLLVRFLNSFFLVFFEFVDLLLVFILFFFQTAFHFRHLNSLFFFRLVLVLGLFFVCHV

SEQ ID NO: 6499 - DNA, 1020 bp, Alloiococcus otitidis
  CDS (100)..(1017)
gtgaggaggaacgccgaaatggttttgaccaagacccgccagcaacagatagcgaaccggaattataaccgcgaacggcgcaagatagcagaatggatcatggaagacgttgaccaagagcaattgatgaaaggcatccaccaagcagctgctgaacgcgtgggcaatatgatcgatgagttttaccgtcgctatgcagggcgtgaagggctgagcgtggaagaagcgaagaaaaaagcaagcgattttgacgttacacagtactttgacaaagcgcgtaaagccgtggctgaaaaagactttagcccggaagctaacgaatggttgcgcacctataatttgaaaatgcgaacgtcacgcttagaagtcttaaaagctgaaatcaatttggaattattgacaatgtatgacgaagaagaagggttaattgagcaatccttgctggacgaagtggaagatgaaatggagcgccaacgggaaataatccgcgaaaacaaagagcaagcgggcattcttggcaattccgtggttagcccgagccaggattaccggaatattgtcaaggctgacttttacggtgcagacttcagcgagcgtatttgggggcgaaccggtcattaccaagaaatgcaacgcgatgtattcaagagtctaggcaatatctttacggacatgatgggttaccggcaagagcgcgatcgtctgatggccaaatttcatacgagcgagaacgaagccatgcgactgctcaagacggaaatggcccgcgtacgggcagactcccaaattgaaagcggcaaggccaatgggttcacccatgccatttacgtggcggaaccaacggcttgcgacgtttgtgcggacttagatggcaccgctattccgctagacgatatccgcgttggggaaaacttttatcccatgcatccgaactgcaaatgtagcagttatatgcaaacgaaaatggactatgtggatggcgggacaaatttagatgagtataaagactatgagccttaa

SEQ ID NO: 6500 - protein, 306 aa, Alloiococcus otitidis
MEDVDQEQLMKGIHQAAAERVGNMIDEFYRRYAGREGLSVEEAKKKASDFDVTQYFDKARKAVAEKDFSPEANEWLRTYNLKMRTSRLEVLKAEINLELLTMYDEEEGLIEQSLLDEVEDEMERQREIIRENKEQAGILGNSVVSPSQDYRNIVKADFYGADFSERIWGRTGHYQEMQRDVFKSLGNIFTDMMGYRQERDRLMAKFHTSENEAMRLLKTEMARVRADSQIESGKANGFTHAIYVAEPTACDVCADLDGTAIPLDDIRVGENFYPMHPNCKCSSYMQTKMDYVDGGTNLDEYKDYEP

SEQ ID NO: 6501 - DNA, 1020 bp, Alloiococcus otitidis; identical to SEQ ID NO: 6499
  CDS (19)..(1017)

SEQ ID NO: 6502 - protein, 333 aa, Alloiococcus otitidis
MVLTKTRQQQIANRNYNRERRKIAEWIMEDVDQEQLMKGIHQAAAERVGNMIDEFYRRYAGREGLSVEEAKKKASDFDVTQYFDKARKAVAEKDFSPEANEWLRTYNLKMRTSRLEVLKAEINLELLTMYDEEEGLIEQSLLDEVEDEMERQREIIRENKEQAGILGNSVVSPSQDYRNIVKADFYGADFSERIWGRTGHYQEMQRDVFKSLGNIFTDMMGYRQERDRLMAKFHTSENEAMRLLKTEMARVRADSQIESGKANGFTHAIYVAEPTACDVCADLDGTAIPLDDIRVGENFYPMHPNCKCSSYMQTKMDYVDGGTNLDEYKDYEP

SEQ ID NO: 6503 - DNA, 1020 bp, Alloiococcus otitidis; identical to SEQ ID NO: 6499
  CDS (1)..(1017)

SEQ ID NO: 6504 - protein, 339 aa, Alloiococcus otitidis
MRRNAEMVLTKTRQQQIANRNYNRERRKIAEWIMEDVDQEQLMKGIHQAAAERVGNMIDEFYRRYAGREGLSVEEAKKKASDFDVTQYFDKARKAVAEKDFSPEANEWLRTYNLKMRTSRLEVLKAEINLELLTMYDEEEGLIEQSLLDEVEDEMERQREIIRENKEQAGILGNSVVSPSQDYRNIVKADFYGADFSERIWGRTGHYQEMQRDVFKSLGNIFTDMMGYRQERDRLMAKFHTSENEAMRLLKTEMARVRADSQIESGKANGFTHAIYVAEPTACDVCADLDGTAIPLDDIRVGENFYPMHPNCKCSSYMQTKMDYVDGGTNLDEYKDYEP

SEQ ID NO: 6505 - DNA, 1527 bp, Alloiococcus otitidis
  CDS (37)..(1524)
agccaaacaactcttccgatagaaaggagcgacagaatgagcgaaggcgactatgtaccaaagtcctatcaatttgaacgggacatggaccgggacaccgtgatgaaccgacatgacagcgtggcgtttcaagacggcgccaacgaccactttctagctgataatatggacgacctactcaatacagtggaaggccacaagcgattgcgccgaatgctgagccaatttagaggcgcacagctagaccgtatcaagattttagatgattattctaaaggcaataataccgacatcaagacaggccagcgtcgcgtggacaagaataaggctgacaaccgtattcagcacaactttggcgggtatattagttcctttgtaacgggttatcttctagggaacccgattaccttagacgaggaaaacctttctgacatccacgaaaacaacgatattaatgctctcaattatgacttgggctatgatgcctcccgctttggccgggcttatgaattgcactaccgtgaccgtgacggacgagataatatttcaattattgacccgagcgaattatttgtgatccgggaagcgagcgttcaatatccaattattggggcggtgcattgcccgacttacaacgggaaaatgcacatcactatttacacagacgactatatttatacttacccgccccaagcttacgaaaacatcaactttaacagtcctgacgtgacccgccatgaatacgggcttgttcctgttgtcgagtggtggaataaccgtttccgtactggggactttgaaccggtcttgagccaaatcaacgcctatgacaatgcgcaatcagacacagctaactacatgtccgacttgaacgatgcaactttagtgctttccgtggatgatattgatagtattggcgggcgtgaaggggccgaagccatggcggacgctaatatttttgtcctcgagaatggcgttacggctaatggctcttccacgcaaggcaaagcggaatatatttacaagcagtatgacgtacaagggaccgaaaaatacaaagaccgcttgttgaacgatattttcaagcttgctaatatcccgaacttggacgacaaaaactttagcggacagcaatcaggtattgcgatccagtacaagctgattggcttacgtcaaattcaagtgattaaagaacgctacttcaccaaggctttgcgccgtcgctacaaattgcttgctaatatccatgaagagttaaacgacacaccaattaacttagagcaattgaaattcacatttcacccgaaccttccgcaagacatttgggaagaagtcggcaactttatcgaagcgggcggtgaattgagtcaggctactttaagagaattggcatccttcaccgacgaagccaccgaagtggaacgcttgacccgcgagagtcccgctcagctttacatgagtgaggaggaacgccgaaatggttttgaccaagacccgccagcaacagatagcgaaccggaattataa

SEQ ID NO: 6506 - protein, 496 aa, Alloiococcus otitidis
MSEGDYVPKSYQFERDMDRDTVMNRHDSVAFQDGANDHFLADNMDDLLNTVEGHKRLRRMLSQFRGAQLDRIKILDDYSKGNNTDIKTGQRRVDKNKADNRIQHNFGGYISSFVTGYLLGNPITLDEENLSDIHENNDINALNYDLGYDASRFGRAYELHYRDRDGRDNISIIDPSELFVIREASVQYPIIGAVHCPTYNGKMHITIYTDDYIYTYPPQAYENINFNSPDVTRHEYGLVPVVEWWNNRFRTGDFEPVLSQINAYDNAQSDTANYMSDLNDATLVLSVDDIDSIGGREGAEAMADANIFVLENGVTANGSSTQGKAEYIYKQYDVQGTEKYKDRLLNDIFKLANIPNLDDKNFSGQQSGIAIQYKLIGLRQIQVIKERYFTKALRRRYKLLANIHEELNDTPINLEQLKFTFHPNLPQDIWEEVGNFIEAGGELSQATLRELASFTDEATEVERLTRESPAQLYMSEEERRNGFDQDPPATDSEPEL

SEQ ID NO: 6507 - DNA, 252 bp, Alloiococcus otitidis
  CDS (1)..(249)
ttgctgtccgctaaagtttttgtcgtccaagttcgggatattagcaagcttgaaaatatcgttcaacaagcggtctttgtatttttcggtcccttgtacgtcatactgcttgtaaatatattccgctttgccttgcgtggaagagccattagccgtaacgccattctcgaggacaaaaatattagcgtccgccatggcttcggccccttcacgcccgccaatactatcaatatcatccacggaaagcactaa

SEQ ID NO: 6508 - protein, 83 aa, Alloiococcus otitidis
MLSAKVFVVQVRDISKLENIVQQAVFVFFGPLYVILLVNIFRFALRGRAISRNAILEDKNISVRHGFGPFTPANTINIIHGKH

SEQ ID NO: 6509 - DNA, 1320 bp, Alloiococcus otitidis
  CDS (40)..(1317)
cagggggcgtgcaatttatcgatgacatcgatcctgaagatgagtgatctgattccgcccaaatttcacgccgtatggaacgccgcgaaagatcctgacattttaaacatcgtttgcaaaggtggccgagggtcgggcaaatcatccgatattgcacatatcctgattcagctcattatgcgaaaggccgtcaacgccgtggcgattcggaagactgataataccctggagcagtcggtttatgagcaattgaaatgggccatccaggagcaaaaggttacacacctgttcaaattcaacaaaagtccgttgcgaatcacttatttaccgcgtgggaattatatcgtctttcgtggcgcacaaaatccggaacgcattaagtctttaaaagacagtcaatttccctttgccattggctggatcgaggaattagccgagtttaaaacggaagatgaagtcaagaccatcaccaactccctcttacggggcgagttaggggacggtcttttttataagttcttctactcttataacccgcccaaacgccgacaatcttgggtcaataaaaagtacaacagtcacttcttaccgttgaatacttatgtgcatcattcgacttatcacgacaatccctacattgcccaagcttttattgacgaagccgaagcaacgaaagaaaagagccaacgccggtacgattgggaatatttgggtgaagccattgggtctggcgttgttccatttgacaatttggtgtttgacaccattccggacgagcaagcgcaagttttcgataacttgcggttcggggtggactttggatacgccaccgatccactagcctttgtctgctggcactatgacaagaagcataatggcatttatgctattgatgaatattatgggcaaaagatttcaaaccgtcagttggcaaaggtcttgcatgcgagaggctatcaaagcgagcgaattgcggccgacagtgccgaaccgaagagcattgccgaactaaagaaagagcatggcattaagcgcgtttatggcgccgtgaaaggtaaagactcagtagagtatggtgaacaatggcttgatgatttggattttatttgtattgatccgaaacgaacgccaaacatcgcgtgggaatttgaaaacatcgattacgacacggaccgctatggcgatccattaccaagactggtggataaagataaccacgctatcgatgcaacaagatacgcgttagggcaggacatgctcaataaaggggaatttaatgctgacaaggccattcataaagccaaacaactcttccgatag

SEQ ID NO: 6510 - protein, 426 aa, Alloiococcus otitidis
MSDLIPPKFHAVWNAAKDPDILNIVCKGGRGSGKSSDIAHILIQLIMRKAVNAVAIRKTDNTLEQSVYEQLKWAIQEQKVTHLFKFNKSPLRITYLPRGNYIVFRGAQNPERIKSLKDSQFPFAIGWIEELAEFKTEDEVKTITNSLLRGELGDGLFYKFFYSYNPPKRRQSWVNKKYNSHFLPLNTYVHHSTYHDNPYIAQAFIDEAEATKEKSQRRYDWEYLGEAIGSGVVPFDNLVFDTIPDEQAQVFDNLRFGVDFGYATDPLAFVCWHYDKKHNGIYAIDEYYGQKISNRQLAKVLHARGYQSERIAADSAEPKSIAELKKEHGIKRVYGAVKGKDSVEYGEQWLDDLDFICIDPKRTPNIAWEFENIDYDTDRYGDPLPRLVDKDNHAIDATRYALGQDMLNKGEFNADKAIHKAKQLFR

SEQ ID NO: 6511 - DNA, 1320 bp, Alloiococcus otitidis; identical to SEQ ID NO: 6509
  CDS (22)..(1317)

SEQ ID NO: 6512 - protein, 432 aa, Alloiococcus otitidis
MTSILKMSDLIPPKFHAVWNAAKDPDILNIVCKGGRGSGKSSDIAHILIQLIMRKAVNAVAIRKTDNTLEQSVYEQLKWAIQEQKVTHLFKFNKSPLRITYLPRGNYIVFRGAQNPERIKSLKDSQFPFAIGWIEELAEFKTEDEVKTITNSLLRGELGDGLFYKFFYSYNPPKRRQSWVNKKYNSHFLPLNTYVHHSTYHDNPYIAQAFIDEAEATKEKSQRRYDWEYLGEAIGSGVVPFDNLVFDTIPDEQAQVFDNLRFGVDFGYATDPLAFVCWHYDKKHNGIYAIDEYYGQKISNRQLAKVLHARGYQSERIAADSAEPKSIAELKKEHGIKRVYGAVKGKDSVEYGEQWLDDLDFICIDPKRTPNIAWEFENIDYDTDRYGDPLPRLVDKDNHAIDATRYALGQDMLNKGEFNADKAIHKAKQLFR

SEQ ID NO: 6513 - DNA, 456 bp, Alloiococcus otitidis
  CDS (40)..(453)
tggaaaatcgataaattaaatgtgcgacaacgaaaatttgtggatgagtacatcatccatgggaacgctacaaaagcagccattaacgcaggctacagcgagaaaacagctggagcgcaagcaggacgtttgttgcataatgttaaaatatcacaagcaatcaaacgccgaaccgaacaactgttcgatgaaaaagccatgtcggtcgcagaagcgattgcgctatcgtctagcattgctagaggcgaaccacagaccagccacttcaaggaaaccgataagcggaaagacgaggttaccaaggaaacggaacgccaatacacaccgtccgtggaagaccgccagcgttccctggaacatattttgaaaattcatggagcctttaccgaccgttccgaaattgaattaacagggggcgtgcaatttatcgatgacatcgatcctgaagatgagtga

SEQ ID NO: 6514 - protein, 138 aa, Alloiococcus otitidis
MDEYIIHGNATKAAINAGYSEKTAGAQAGRLLHNVKISQAIKRRTEQLFDEKAMSVAEAIALSSSIARGEPQTSHFKETDKRKDEVTKETERQYTPSVEDRQRSLEHILKIHGAFTDRSEIELTGGVQFIDDIDPEDE

SEQ ID NO: 6515 - DNA, 456 bp, Alloiococcus otitidis; identical to SEQ ID NO: 6513
  CDS (22)..(453)

SEQ ID NO: 6516 - protein, 144 aa, Alloiococcus otitidis
MRQRKFVDEYIIHGNATKAAINAGYSEKTAGAQAGRLLHNVKISQAIKRRTEQLFDEKAMSVAEAIALSSSIARGEPQTSHFKETDKRKDEVTKETERQYTPSVEDRQRSLEHILKIHGAFTDRSEIELTGGVQFIDDIDPEDE

SEQ ID NO: 6517 - DNA, 279 bp, Alloiococcus otitidis
  CDS (49)..(276)
attttcaaaatatgttccagggaacgctggcggtcttccacggacggtgtgtattggcgttccgtttccttggtaacctcgtctttccgcttatcggtttccttgaagtggctggtctgtggttcgcctctagcaatgctagacgatagcgcaatcgcttctgcgaccgacatggctttttcatcgaacagttgttcggttcggcgtttgattgcttgtgatattttaacattatgcaacaaacgtcctgcttgcgctccagctgttttctcgctgtag

SEQ ID NO: 6518 - protein, 76 aa, Alloiococcus otitidis
MYWRSVSLVTSSFRLSVSLKWLVCGSPLAMLDDSAIASATDMAFSSNSCSVRRLIACDILTLCNKRPACAPAVFSL

SEQ ID NO: 6519 - DNA, 426 bp, Alloiococcus otitidis
  CDS (1)..(423)
atgacgccaagggagtactttcagcaatgcctaacgctcgatcacgccgtaactgaaaagcaaaatcaatacgaattggtcaaggcgagcattttatcagccagtaagattagtgatgtgaatgttcagtcatccccgactcgtacgcacgaagataagttgcaccgactctttaaacttcatgacgatgtggataagcaggttgatgagttagttgactataaattaaaactatccatggaagtgaatgaattgtcggatgaccgttaccgtatggtattatctgaacgctattttaaaggcaaaacctttgagcgtattgcccaacagcaccattatagcgtccggtgggtgcggaagctacacgagcaggccttgcgagcttttgaaaaactattcccgcacaaattcatgaggaccttttaa

SEQ ID NO: 6520 - protein, 141 aa, Alloiococcus otitidis
MTPREYFQQCLTLDHAVTEKQNQYELVKASILSASKISDVNVQSSPTRTHEDKLHRLFKLHDDVDKQVDELVDYKLKLSMEVNELSDDRYRMVLSERYFKGKTFERIAQQHHYSVRWVRKLHEQALRAFEKLFPHKFMRTF

SEQ ID NO: 6521 - DNA, 522 bp, Alloiococcus otitidis
  CDS (226)..(519)
aggaggtccagcgtggaagaacgcattattaaccttattcgatcgatcgaaaatgaatatggtcatgttagcgattgccccgatgatgatcagcgcctccagcaggttcaagactactttaacgcttcagtgaaggcccctgcttctcctcaagacttggccactatacgagataaaattaacgattatgggcccaacttggcccccgtggcgaaataccttcagatgagtgagcgacgggcgagagaggccttgacgctctttagagatgacgttgatgtcaacgatctaccgatcattgaagaaatgattgatgatgaaatccaacaagggcatacaaaatacttgtttattacgcccgaagaggcccaagcgataaaacaaaagcggaagcggaaaggcgtgaagcaagctgatttatccatggggagccgtgtcattcggcatatggagtatggcggacgggttaagcggcagacctataaccgctatatggacaagttggaagaggtgagtgaatga

SEQ ID NO: 6522 - protein, 98 aa, Alloiococcus otitidis
MSERRAREALTLFRDDVDVNDLPIIEEMIDDEIQQGHTKYLFITPEEAQAIKQKRKRKGVKQADLSMGSRVIRHMEYGGRVKRQTYNRYMDKLEEVSE

SEQ ID NO: 6523 - DNA, 522 bp, Alloiococcus otitidis; identical to SEQ ID NO: 6521
  CDS (13)..(519)

SEQ ID NO: 6524 - protein, 169 aa, Alloiococcus otitidis
MEERIINLIRSIENEYGHVSDCPDDDQRLQQVQDYFNASVKAPASPQDLATIRDKINDYGPNLAPVAKYLQMSERRAREALTLFRDDVDVNDLPIIEEMIDDEIQQGHTKYLFITPEEAQAIKQKRKRKGVKQADLSMGSRVIRHMEYGGRVKRQTYNRYMDKLEEVSE

SEQ ID NO: 6525 - DNA, 582 bp, Alloiococcus otitidis
  CDS (13)..(579)
aggaggaaacccatgatgactaaaacttttggtgctttactcaaagaagaacggttgaagcgaggactgagtcgttataaaattcaaggtgtactcgggacatttggccaaacgtataccaagtgggaagaagatagggtggtgccacgccctcattcggtttaccaggtagccgtggcactggattggccaattgaaaaagtcgaaccgtggctccatttacctgataagcctgtggtgttgcgtcagctactgctcagaagtttagaagagggagtatcacaaaaacaaatggcggcttatatgggcattgctgaaactgattttggtagttatgtttccgggcgtaaaacggttccgcctcatcatttgaaacaaatggaagacatgctgttagaaccgaactggggccttgcgagttatttagacgaaaaggatcgagtgggggctggtggcgtgatcaattatgcccttgtcgctgaactcgaagatgaatttgggcagctatcgctcgtgccggaagacgatgaacgattagaagcgatcaaagaagacttaaacgtcgtctcgaacaccgtataa

SEQ ID NO: 6526 - protein, 189 aa, Alloiococcus otitidis
MMTKTFGALLKEERLKRGLSRYKIQGVLGTFGQTYTKWEEDRVVPRPHSVYQVAVALDWPIEKVEPWLHLPDKPVVLRQLLLRSLEEGVSQKQMAAYMGIAETDFGSYVSGRKTVPPHHLKQMEDMLLEPNWGLASYLDEKDRVGAGGVINYALVAELEDEFGQLSLVPEDDERLEAIKEDLNVVSNTV

SEQ ID NO: 6527 - DNA, 279 bp, Alloiococcus otitidis
  CDS (46)..(276)
tgcttatgtgcttgtggatcgagtaataggcgaggagtcttggcaatgaagtctagcaatccaatcaagcccggccactacaaacaaggccgtctagatttgtttgatgcctggtatgaaaccttacccttccagcactacaaaacggtcatggtttgcattgctgagcggtatatgaagcgtgagaaagacgatcctgttcaggatattggtaaggccattgaaacactgaaacgattacgcagcaatatggtgaaggaggaaacccatgatgactaa

SEQ ID NO: 6528 - protein, 77 aa, Alloiococcus otitidis
MKSSNPIKPGHYKQGRLDLFDAWYETLPFQHYKTVMVCIAERYMKREKDDPVQDIGKAIETLKRLRSNMVKEETHDD

SEQ ID NO: 6529 - DNA, 279 bp, Alloiococcus otitidis; identical to SEQ ID NO: 6527
  CDS (40)..(276)

SEQ ID NO: 6530 - protein, 79 aa, Alloiococcus otitidis
MAMKSSNPIKPGHYKQGRLDLFDAWYETLPFQHYKTVMVCIAERYMKREKDDPVQDIGKAIETLKRLRSNMVKEETHDD

SEQ ID NO: 6531 - DNA, 378 bp, Alloiococcus otitidis
  CDS (64)..(375)
gcgaaacaatatccagtcctacaatcaagccgctatctttttgatcgaaaaggggttgcgctaatggcatctgaagcaaaagtgcaaaatgatattttgctggccgttaatcaagcgggccaccgcttatggcgcagcaatgccgggaaaattaaaaccaattttggccaatgggtgaagctctttccgaagggtttccccgatacggttggctaccggaaaggcgacggaaaatttattgcgattgaggtcaaaaatgagtccggtcgtttacgatctgagcaaaagcaatttcgggattttgcccgaacgcaaccgatcttatacggggtggcacacagcgtggatgaagcttttcaaattattgaggaggattga

SEQ ID NO: 6532 - protein, 104 aa, Alloiococcus otitidis
MASEAKVQNDILLAVNQAGHRLWRSNAGKIKTNFGQWVKLFPKGFPDTVGYRKGDGKFIAIEVKNESGRLRSEQKQFRDFARTQPILYGVAHSVDEAFQIIEED

SEQ ID NO: 6533 - DNA, 411 bp, Alloiococcus otitidis
  CDS (58)..(408)
gccttaccccccgcgtggacttctctactcgtaaaatttaaaagaaaggattttgagatgttatttcaagattatttagatgaccgtttaacttccaatacgaatttagacaatctagccaataaattgaaagaagaccctgaccttccccgtaccaatgaattcgacgatatcagtcactatatgacggagagccctcgttacacggctgaccaggccaatgctctagctcccttgtggaaatcatacttgaagcaaaatagacgaactcataaccgctttggtgtgaagcaaacatcactcaacttaccagcgcctttaaatgatcagattgaaaagtaccgtaagcgaaacaatatccagtcctacaatcaagccgctatctttttgatcgaaaaggggttgcgctaa

SEQ ID NO: 6534 - protein, 117 aa, Alloiococcus otitidis
MLFQDYLDDRLTSNTNLDNLANKLKEDPDLPRTNEFDDISHYMTESPRYTADQANALAPLWKSYLKQNRRTHNRFGVKQTSLNLPAPLNDQIEKYRKRNNIQSYNQAAIFLIEKGLR

SEQ ID NO: 6535 - DNA, 2331 bp, Alloiococcus otitidis
  CDS (40)..(2328)
cgaagacgacattccattttaaggaggaacgagttggcaatgataccgcaagaactgaaagaattgaagcaatggtgcgtttggaagtatgagaaacggaacgggaagcaaaccaaaataccgtacgaccccaacacttaccaaaacgcgaagagcaatgatacaagcacatgggcggactttcaaaccgcccgtgcggcttttcaagaaacagatgctgacggcttaggttttttctttcaaccgccttacatgggcattgacctagatgatattgctaccgacttggagcgttttaaaaacggcgaccacaccgacaatatagtatcgaaattttaccacagcttggaaagctatggcgagattagtccatctggtcaagggatccacattattttaaagggtcaagtcccaggggacaccaagcggaaaggcaatgtggaaatgtacgacagcggccgttttttcaccatgaccggggacagtttaggacgctatcaaacaatcaatcagcccaaccaagcggcctttcatcgtttgtatgaacattatattcaaccaaaccaaaacaagattgttcatcacaagttccgcaaatccacggtacacgacttgtctgagcgggagattatcaaccgtattttagccagtaagcaaggtgatttgttcaagaaattcatgaatgaccattggcaggatgattatccttctcaatcagaagctgacatcgccttggccaacattttggcgttctggtgcgccaaggattatgagaagatggacagtatctttcgtcagtctagcttataccggtcaaaatgggacgcgaagcgggggaaaaccacgtacgggagtgctacccttcaccgggctattaacgacacgcagaacgtttatgagccggataagcacaaacgcgaaccgctcaaatatcattttacctttgaccaatcaaacgataaagattacccagcccgttcatgggacgacaccggcaacgctgaccgtttcatggatcgttacggggacattgttcgttattcattcgtccacaattgcttttatgtgtacgatggcacacgctggaaagttgacgacatgggcgaagtccgacagctagtagacgctatgattgacgacttaaaaaatgaaaccattgaagtcccagaagacatggatgaagaagaagcgcagaaagcgttccggaagttcattaaaaccagtcgtagcaccaaccataaagataatgtaatgaaggaaattcggcaccgggttcccgtgtccacggatgcttttgaccaagacaacatggctctcaacgttcaaaatggctatattgatttatcgaatggtacactacacgatcacgacagtgccaaaggcttttccaaagtgacgcaattcgattataccgagaaagatactcccgatacctggcttgactttctaaatgatgtattcgacggcgaccaagccaccatcgattatatccagaaagccttagggtattccttgacggggagtacccgtgaacaagtcatgttcattctccacggaaaagggaataacgggaaatcactctttatcgaaaccgtttcggaaatcttaggcaattatgccaaaaccgttcgagctgatagcttaatggtcaagcgtaatcaaggcgtaaacaacgacattgctgctttacaaggttccagaatggtgacctctagcgagcctaacgaaggctttcgctttgatgaaggactgattaaacagttaaccggtggcgataaagtcaccgcgcggttcttatatggagaagattttgaatatactcccaaatttaaattgtgggtgtccaccaaccataagccgattgttcgcgggacggatgacgggatctggcgccggctgatcctcatcccatttgatgtgcagatcccaaaagataaagttgacaaagaccttaaatacaagcttctaagagaagcgcccgctatccttgaatggttagtcgaaggaaccattcaatggcaagaagaggggctaacagcaccgcacaaaattgtccacgcaagtcaggactaccggcaagatatggacgtcttagaacactttattgccgatgaatgccaacgtttggatgatggcctcgctcctgctggccgactgtatgaagtctacaaacgttgggctgacgacagtggtgagtacaagatgaataagaatacgtttggcaagaaaatgaaagagaagtttagtcgaacacataatgaaaagggtaatttttataaaggacttgtcattaaagaaaaatatcccggccttcatgaccttcattactga

SEQ ID NO: 6536 - protein, 763 aa, Alloiococcus otitidis
MIPQELKELKQWCVWKYEKRNGKQTKIPYDPNTYQNAKSNDTSTWADFQTARAAFQETDADGLGFFFQPPYMGIDLDDIATDLERFKNGDHTDNIVSKFYHSLESYGEISPSGQGIHIILKGQVPGDTKRKGNVEMYDSGRFFTMTGDSLGRYQTINQPNQAAFHRLYEHYIQPNQNKIVHHKFRKSTVHDLSEREIINRILASKQGDLFKKFMNDHWQDDYPSQSEADIALANILAFWCAKDYEKMDSIFRQSSLYRSKWDAKRGKTTYGSATLHRAINDTQNVYEPDKHKREPLKYHFTFDQSNDKDYPARSWDDTGNADRFMDRYGDIVRYSFVHNCFYVYDGTRWKVDDMGEVRQLVDAMIDDLKNETIEVPEDMDEEEAQKAFRKFIKTSRSTNHKDNVMKEIRHRVPVSTDAFDQDNMALNVQNGYIDLSNGTLHDHDSAKGFSKVTQFDYTEKDTPDTWLDFLNDVFDGDQATIDYIQKALGYSLTGSTREQVMFILHGKGNNGKSLFIETVSEILGNYAKTVRADSLMVKRNQGVNNDIAALQGSRMVTSSEPNEGFRFDEGLIKQLTGGDKVTARFLYGEDFEYTPKFKLWVSTNHKPIVRGTDDGIWRRLILIPFDVQIPKDKVDKDLKYKLLREAPAILEWLVEGTIQWQEEGLTAPHKIVHASQDYRQDMDVLEHFIADECQRLDDGLAPAGRLYEVYKRWADDSGEYKMNKNTFGKKMKEKFSRTHNEKGNFYKGLVIKEKYPGLHDLHY

SEQ ID NO: 6537 - DNA, 2331 bp, Alloiococcus otitidis; identical to SEQ ID NO: 6535
  CDS (34)..(2328)

SEQ ID NO: 6538 - protein, 765 aa, Alloiococcus otitidis
MAMIPQELKELKQWCVWKYEKRNGKQTKIPYDPNTYQNAKSNDTSTWADFQTARAAFQETDADGLGFFFQPPYMGIDLDDIATDLERFKNGDHTDNIVSKFYHSLESYGEISPSGQGIHIILKGQVPGDTKRKGNVEMYDSGRFFTMTGDSLGRYQTINQPNQAAFHRLYEHYIQPNQNKIVHHKFRKSTVHDLSEREIINRILASKQGDLFKKFMNDHWQDDYPSQSEADIALANILAFWCAKDYEKMDSIFRQSSLYRSKWDAKRGKTTYGSATLHRAINDTQNVYEPDKHKREPLKYHFTFDQSNDKDYPARSWDDTGNADRFMDRYGDIVRYSFVHNCFYVYDGTRWKVDDMGEVRQLVDAMIDDLKNETIEVPEDMDEEEAQKAFRKFIKTSRSTNHKDNVMKEIRHRVPVSTDAFDQDNMALNVQNGYIDLSNGTLHDHDSAKGFSKVTQFDYTEKDTPDTWLDFLNDVFDGDQATIDYIQKALGYSLTGSTREQVMFILHGKGNNGKSLFIETVSEILGNYAKTVRADSLMVKRNQGVNNDIAALQGSRMVTSSEPNEGFRFDEGLIKQLTGGDKVTARFLYGEDFEYTPKFKLWVSTNHKPIVRGTDDGIWRRLILIPFDVQIPKDKVDKDLKYKLLREAPAILEWLVEGTIQWQEEGLTAPHKIVHASQDYRQDMDVLEHFIADECQRLDDGLAPAGRLYEVYKRWADDSGEYKMNKNTFGKKMKEKFSRTHNEKGNFYKGLVIKEKYPGLHDLHY

SEQ ID NO: 6539 - DNA, 438 bp, Alloiococcus otitidis
  CDS (1)..(435)
atgaccattggcaggatgattatccttctcaatcagaagctgacatcgccttggccaacattttggcgttctggtgcgccaaggattatgagaagatggacagtatctttcgtcagtctagcttataccggtcaaaatgggacgcgaagcgggggaaaaccacgtacgggagtgctacccttcaccgggctattaacgacacgcagaacgtttatgagccggataagcacaaacgcgaaccgctcaaatatcattttacctttgaccaatcaaacgataaagattacccagcccgttcatgggacgacaccggcaacgctgaccgtttcatggatcgttacggggacattgttcgttattcattcgtccacaattgcttttatgtgtacgatggcacacgctggaaagttgacgacatgggcgaagtccgacagctag

SEQ ID NO: 6540 - protein, 145 aa, Alloiococcus otitidis
MTIGRMIILLNQKLTSPWPTFWRSGAPRIMRRWTVSFVSLAYTGQNGTRSGGKPRTGVLPFTGLLTTRRTFMSRISTNANRSNIILPLTNQTIKITQPVHGTTPATLTVSWIVTGTLFVIHSSTIAFMCTMAHAGKLTTWAKSDS

SEQ ID NO: 6541 - DNA, 261 bp, Alloiococcus otitidis
  CDS (13)..(258)
acgttgagagccatgttgtcttggtcaaaagcatccgtggacacgggaacccggtgccgaatttccttcattacattatctttatggttggtgctacgactggttttaatgaacttccggaacgctttctgcgcttcttcttcatccatgtcttctgggacttcaatggtttcattttttaagtcgtcaatcatagcgtctactagctgtcggacttcgcccatgtcgtcaactttccagcgtgtgccatcgtacacataa

SEQ ID NO: 6542 - protein, 82 aa, Alloiococcus otitidis
MLSWSKASVDTGTRCRISFITLSLWLVLRLVLMNFRNAFCASSSSMSSGTSMVSFFKSSIIASTSCRTSPMSSTFQRVPSYT

SEQ ID NO: 6543 - DNA, 261 bp, Alloiococcus otitidis; identical to SEQ ID NO: 6541
  CDS (4)..(258)

SEQ ID NO: 6544 - protein, 85 aa, Alloiococcus otitidis
MRAMLSWSKASVDTGTRCRISFITLSLWLVLRLVLMNFRNAFCASSSSMSSGTSMVSFFKSSIIASTSCRTSPMSSTFQRVPSYT

SEQ ID NO: 6545 - DNA, 534 bp, Alloiococcus otitidis
  CDS (1)..(531)
atgttatttaaagcagactactcaaatctcaacaatggcaataaagatttcgaacctttacccaccggcgaatacgaaatgatcattaaaaaagcaggtgaaaatgctaccccaaacggtgcggaaaccttccagattgaccttgtggttcgaaacgatattgaagagaataaaggctaccaaaaccgccacatctttaacgacaattggaaacgaaaaaatgggccaaacgcaggccaataccccgttgatgactttcaatatattttaatggcgactgaagtaccagaaggaaccgaaataaactcaatggatgatttcgcccaagctatcactggcaagccggttcgtgtttacgtcaagaaagaatattccgactaccgcgaagaagacgtgaatgaagtggcgccgtggaattatgggaaaagtcattaccccatcgttaatcacacctggaaagatggaacgccagcgagttcaccagctgatgatgacgacgagattaccattaacgaagacgacattccattttaa

SEQ ID NO: 6546 - protein, 177 aa, Alloiococcus otitidis
MLFKADYSNLNNGNKDFEPLPTGEYEMIIKKAGENATPNGAETFQIDLVVRNDIEENKGYQNRHIFNDNWKRKNGPNAGQYPVDDFQYILMATEVPEGTEINSMDDFAQAITGKPVRVYVKKEYSDYREEDVNEVAPWNYGKSHYPIVNHTWKDGTPASSPADDDDEITINEDDIPF

SEQ ID NO: 6547 - DNA, 1434 bp, Alloiococcus otitidis
  CDS (238)..(1431)
gtgaactcgttgtataagctttatgactaccaagaagagcttgttaaacgaacgagaaaggctctgacacgccaccaaggtgttttagtggtgagtccagccggaagcgggaaatcagtcgtcatcgctgaaattgctcgcctgacgacacagaaccaacgacccattttattcatcgttcatcgcaaagaattggccgaccaaattgaagccagctttcaacaaaaccatgtggacatggcctatgtcacgattatgaccgttcgcaaagccgcgaaccggttagctgaattgcccgagccgtctttgattatcacggacgaaacgcaccacagccgggctaaaagctatcaagacatttacacttattttgatcaggcttaccgcttgggctttacagcaagtccgtggcgcttaaatggacgtgggtttgacgatctctatggggagatggtggaaggccctagtgttcaatggctcattgatcatcaatttttagccccctatcgctattttgccccgaaattagcggacttaagcaagctaaaaaggtcatccacaggggatttttccaagcgttcgattgatcaagcgatgaagaaggccgtttttggggatgtcgttcagcactaccagaagttagccagcggtcagcaagccattttatacgcccattcagttcaagcgagccggcaactcgctaagacgttccaagcagaaggtgttcaagccgttcacgcagacagccacacaccgaagcaagagcgagccaaaattatggacgacttcaagcaaggtaatctcaaaatattatgtaatgtcgacttgatcagcgaaggctttgacgttcccgattgccaatgtgtcatcttagttcgcccaaccgcaagccttgtgcttcacatccagcaatccatgcgtagcatgcgctataagcccgggaaaacagccaccattattgaccacgttggcaattatgagttgcacggccttcccaacactgaacgagactggacactacacggtcgcaagaaacaagcgaaggtcaagccccgggatgatgtccccagcgtgacggaatgcccacactgctttgcggttattccaagtgggaaaaccatttgtccgatgtgcgggcaaagcattcaagctaacagcggtcatgatgatttagagcaggtggatgctgacttagtagaagtcgatcaaccaacttttaaggcggattaccgcaaagtccgattgcagcgagattatctaaaacgtaagcagtccgatttagacaatttagaagattggtattgttatgccaagtcccgaggctataaagatggttggcttaagtaccattatcaacctcttcaaccattatcatggcctcaattttaccaaaccatacacccttataaagaaaaatacaaaggagttttttag

SEQ ID NO: 6548 - protein, 398 aa, Alloiococcus otitidis
MAYVTIMTVRKAANRLAELPEPSLIITDETHHSRAKSYQDIYTYFDQAYRLGFTASPWRLNGRGFDDLYGEMVEGPSVQWLIDHQFLAPYRYFAPKLADLSKLKRSSTGDFSKRSIDQAMKKAVFGDVVQHYQKLASGQQAILYAHSVQASRQLAKTFQAEGVQAVHADSHTPKQERAKIMDDFKQGNLKILCNVDLISEGFDVPDCQCVILVRPTASLVLHIQQSMRSMRYKPGKTATIIDHVGNYELHGLPNTERDWTLHGRKKQAKVKPRDDVPSVTECPHCFAVIPSGKTICPMCGQSIQANSGHDDLEQVDADLVEVDQPTFKADYRKVRLQRDYLKRKQSDLDNLEDWYCYAKSRGYKDGWLKYHYQPLQPLSWPQFYQTIHPYKEKYKGVF

SEQ ID NO: 6549 - DNA, 1434 bp, Alloiococcus otitidis; identical to SEQ ID NO: 6547
  CDS (10)..(1431)

SEQ ID NO: 6550 - protein, 474 aa, Alloiococcus otitidis
MYKLYDYQEELVKRTRKALTRHQGVLVVSPAGSGKSVVIAEIARLTTQNQRPILFIVHRKELADQIEASFQQNHVDMAYVTIMTVRKAANRLAELPEPSLIITDETHHSRAKSYQDIYTYFDQAYRLGFTASPWRLNGRGFDDLYGEMVEGPSVQWLIDHQFLAPYRYFAPKLADLSKLKRSSTGDFSKRSIDQAMKKAVFGDVVQHYQKLASGQQAILYAHSVQASRQLAKTFQAEGVQAVHADSHTPKQERAKIMDDFKQGNLKILCNVDLISEGFDVPDCQCVILVRPTASLVLHIQQSMRSMRYKPGKTATIIDHVGNYELHGLPNTERDWTLHGRKKQAKVKPRDDVPSVTECPHCFAVIPSGKTICPMCGQSIQANSGHDDLEQVDADLVEVDQPTFKADYRKVRLQRDYLKRKQSDLDNLEDWYCYAKSRGYKDGWLKYHYQPLQPLSWPQFYQTIHPYKEKYKGVF

SEQ ID NO: 6551 - DNA, 1434 bp, Alloiococcus otitidis; identical to SEQ ID NO: 6547
  CDS (1)..(1431)

SEQ ID NO: 6552 - protein, 477 aa, Alloiococcus otitidis
MNSLYKLYDYQEELVKRTRKALTRHQGVLVVSPAGSGKSVVIAEIARLTTQNQRPILFIVHRKELADQIEASFQQNHVDMAYVTIMTVRKAANRLAELPEPSLIITDETHHSRAKSYQDIYTYFDQAYRLGFTASPWRLNGRGFDDLYGEMVEGPSVQWLIDHQFLAPYRYFAPKLADLSKLKRSSTGDFSKRSIDQAMKKAVFGDVVQHYQKLASGQQAILYAHSVQASRQLAKTFQAEGVQAVHADSHTPKQERAKIMDDFKQGNLKILCNVDLISEGFDVPDCQCVILVRPTASLVLHIQQSMRSMRYKPGKTATIIDHVGNYELHGLPNTERDWTLHGRKKQAKVKPRDDVPSVTECPHCFAVIPSGKTICPMCGQSIQANSGHDDLEQVDADLVEVDQPTFKADYRKVRLQRDYLKRKQSDLDNLEDWYCYAKSRGYKDGWLKYHYQPLQPLSWPQFYQTIHPYKEKYKGVF

SEQ ID NO: 6553 - DNA, 696 bp, Alloiococcus otitidis
  CDS (13)..(693)
ggagggaacaagatggagattaaaagcgctactgatttaacggaagagaatgcgacctatcttatttatggtggtcaaggcgttggtaaaacaagttccttgaaatacttgccgggcaaaaccttagtgattgatattgataagtccagtcgagttctcaaaggagaagaagctattgacgtggcctctatcgataccagcaatatttgggaagagtggaataatattgcgaaagaattaattaccgataaaagctaccaagaaaaatacgataatatcgtgatcgacaatatcagcgaactgttccgatcctcccttgaaaatcttgggaaaaggggcaaggcaagccaaaaaggggtaccggctatgtccgattaccagattgtcgattttatgatcatgcgagcgttaagaggcttacagaccttagatgttcgccttatcttaaccgcttgggagaaaaccgataagtacgagcatgaaagcgggcaaacctttaaccgtgcttttccggatttacggaactcgattgctgaaaattttatggggctttgtgacgtcatcgctagactgattattgtgcagcgcgacaatgagcaagttcgtggcttcctactccagccgactcctgaagtcattgctaaaaaccgcttagacgaccgcacaggagctaaggtaagtgaactcgttgtataa

SEQ ID NO: 6554 - protein, 227 aa, Alloiococcus otitidis
MEIKSATDLTEENATYLIYGGQGVGKTSSLKYLPGKTLVIDIDKSSRVLKGEEAIDVASIDTSNIWEEWNNIAKELITDKSYQEKYDNIVIDNISELFRSSLENLGKRGKASQKGVPAMSDYQIVDFMIMRALRGLQTLDVRLILTAWEKTDKYEHESGQTFNRAFPDLRNSIAENFMGLCDVIARLIIVQRDNEQVRGFLLQPTPEVIAKNRLDDRTGAKVSELVV

SEQ ID NO: 6555 - DNA, 348 bp, Alloiococcus otitidis
  CDS (85)..(345)
caagctcttcttggtagtcataaagcttatacaacgagttcacttaccttagctcctgtgcggtcgtctaagcggtttttagcaatgacttcaggagtcggctggagtaggaagccacgaacttgctcattgtcgcgctgcacaataatcagtctagcgatgacgtcacaaagccccataaaattttcagcaatcgagttccgtaaatccggaaaagcacggttaaaggtttgcccgctttcatgctcgtacttatcggttttctcccaagcggttaagataaggcgaacatctaaggtctgtaagcctcttaacgctcgcatgatcataaaatcgacaatctggtaa

SEQ ID NO: 6556 - protein, 87 aa, Alloiococcus otitidis
MTSGVGWSRKPRTCSLSRCTIISLAMTSQSPIKFSAIEFRKSGKARLKVCPLSCSYLSVFSQAVKIRRTSKVCKPLNARMIIKSTIW

SEQ ID NO: 6557 - DNA, 348 bp, Alloiococcus otitidis; identical to SEQ ID NO: 6555
  CDS (58)..(345)

SEQ ID NO: 6558 - protein, 96 aa, Alloiococcus otitidis
MRSSKRFLAMTSGVGWSRKPRTCSLSRCTIISLAMTSQSPIKFSAIEFRKSGKARLKVCPLSCSYLSVFSQAVKIRRTSKVCKPLNARMIIKSTIW

SEQ ID NO: 6559 - DNA, 480 bp, Alloiococcus otitidis
  CDS (4)..(477)
ggaatgaatttatatgaattgagtggcagctatgtgcaacttcaaaatattttggaagatatggaggatgaggatattgccgccgctttagatgaagtcaatgatagctttgaaaacaaagcgattaacaccgtgaaaatgattcaatcgtttgaagcggatgctaaagccgtgaaagaagagaagcaacgattggggaaacggcaaaagacactagagaataaagcccaaagcttgaaaaattatatttatgacaatatgaaagcaacccaaaaagacaaaatcaaatctgatctcttcaatatttccattcgcaagaacccgcctgctttagatatccacagtgaggaagctatcccggctgaattctacattgagcaaaaaccgaaactcgataagcaaaagctaaaagaatacgttaaagaatacggcttagacggcgtggaactcaaacaaggcgaaagcttaagcatacgataa

SEQ ID NO: 6560 - protein, 158 aa, Alloiococcus otitidis
MNLYELSGSYVQLQNILEDMEDEDIAAALDEVNDSFENKAINTVKMIQSFEADAKAVKEEKQRLGKRQKTLENKAQSLKNYIYDNMKATQKDKIKSDLFNISIRKNPPALDIHSEEAIPAEFYIEQKPKLDKQKLKEYVKEYGLDGVELKQGESLSIR

SEQ ID NO: 6561 - DNA, 252 bp, Alloiococcus otitidis
  CDS (43)..(249)
atttttggtagaacgcatattaagagaacaggaggtcttgaaatgaaagagaaaatcattgttgccttggccacgctgaatgtcacattgatgtggtacattttcgaactaccgcaccggcccaattacgcccctggaggtgaatttgcagttccgttgttggtctttctcttctggttgattggtcatgaaatacagcagaacgaaaaaagacgacgtaagtacgccgactacaaaaaaagagaactgtaa

SEQ ID NO: 6562 - protein, 69 aa, Alloiococcus otitidis
MKEKIIVALATLNVTLMWYIFELPHRPNYAPGGEFAVPLLVFLFWLIGHEIQQNEKRRRKYADYKKREL

SEQ ID NO: 6563 - DNA, 492 bp, Alloiococcus otitidis
  CDS (1)..(489)
gtgaacatcattataaacaacattaaagttaatactgaaaggaaattaaatgaaaccgacttagatttagtttattcaataggaacaatgggctatctcaaagatatttttagtcatctctattctactgtaaaatcaccaaccggcacaattgatgctattaagcttgaatttattgctaactttatacgaggggaaacgtttggcgactttgttgatcaagaatttttagagaacttgctagaaagaataagatttttgtcaagaacaacaatcgaattaaacattaagcgttcctcatctttagaatctattgttagcagagcaaatatattacctatcagtatcctagaaaacacttgcgatgatggcactactgaaatttacgttcatatttttaaaacacccactttgtttgattatggtattagtcaagaaggatataaatttttggtagaacgcatattaagagaacaggaggtcttgaaatga

SEQ ID NO: 6564 - protein, 163 aa, Alloiococcus otitidis
MNIIINNIKVNTERKLNETDLDLVYSIGTMGYLKDIFSHLYSTVKSPTGTIDAIKLEFIANFIRGETFGDFVDQEFLENLLERIRFLSRTTIELNIKRSSSLESIVSRANILPISILENTCDDGTTEIYVHIFKTPTLFDYGISQEGYKFLVERILREQEVLK

SEQ ID NO: 6565 - DNA, 171 bp, Alloiococcus otitidis
  CDS (1)..(168)
atggactatgaaatgatgattactcactctataccacttgaaaaagcaagggaaactgtctttgaggactatgctttaaccgaaaatgaaaaagacaaactcatggtgcaaatgctgaagattttagaggatgaagtaaaaacgttatatcgatggcaggattttgcctaa

SEQ ID NO: 6566 - protein, 56 aa, Alloiococcus otitidis
MDYEMMITHSIPLEKARETVFEDYALTENEKDKLMVQMLKILEDEVKTLYRWQDFA

SEQ ID NO: 6567 - DNA, 315 bp, Alloiococcus otitidis
  CDS (25)..(312)
atattatttaaaggaggtgaccccatgcaaaccttagatatccaggttcaagtacctgaagatcacgtactcattaaacgggcggaacttgaggagttaaaaaacaatgacctcaccgggaaggtttgggaaatgaaagacttaagccaagccacgcggcgaagtgctgattggctcaaagagtatattctttacccctaccgttctgacttagaaacattcgtcaaatacccacgtggaaagggggatcgctggaagtttggggctaagcagatgagccaatggttggaagaccatttagaggaggtgatgtaa

SEQ ID NO: 6568 - protein, 96 aa, Alloiococcus otitidis
MQTLDIQVQVPEDHVLIKRAELEELKNNDLTGKVWEMKDLSQATRRSADWLKEYILYPYRSDLETFVKYPRGKGDRWKFGAKQMSQWLEDHLEEVM

SEQ ID NO: 6569 - DNA, 231 bp, Alloiococcus otitidis
  CDS (28)..(228)
atcaagctaaaagaaaggagcaaaaaaatgaaatacaatttaaaagctttgcgtggattgaaggatttatctcaagctgaagcagctcaacttgtaggcgttagtgagtataagtggcgcaattgggaacatgctaaatcttttccagacgttccggaaattcaagcaatagaaaaagcttttaatgtcagttacgacgatattatttttttacctaaagttacggtttaa

SEQ ID NO: 6570 - protein, 67 aa, Alloiococcus otitidis
MKYNLKALRGLKDLSQAEAAQLVGVSEYKWRNWEHAKSFPDVPEIQAIEKAFNVSYDDIIFLPKVTV

SEQ ID NO: 6571 - DNA, 276 bp, Alloiococcus otitidis
  CDS (37)..(273)
aaagcaggagtatgtatgtcatttgttgattctgggatgagtataatttcctctttatcattattgaattttactttttttaaagtggcttcattaccattaattttcacaacagccacattgccattatcaatggtagcttctgtatcaacaagaacatacgaacccacggggaacattttgtccattgagtcagatttcacttttaaatacataaggcccttattcgatactttaccagggggcaaagtcatgtacccttcaatatcttcttga

SEQ ID NO: 6572 - protein, 79 aa, Alloiococcus otitidis
MSIISSLSLLNFTFFKVASLPLIFTTATLPLSMVASVSTRTYEPTGNILSIESDFTFKYIRPLFDTLPGGKVMYPSISS

SEQ ID NO: 6573 - DNA, 276 bp, Alloiococcus otitidis; identical to SEQ ID NO: 6571
  CDS (16)..(273)

SEQ ID NO: 6574 - protein, 86 aa, Alloiococcus otitidis
MSFVDSGMSIISSLSLLNFTFFKVASLPLIFTTATLPLSMVASVSTRTYEPTGNILSIESDFTFKYIRPLFDTLPGGKVMYPSISS

SEQ ID NO: 6575 - DNA, 717 bp, Alloiococcus otitidis
  CDS (88)..(714)
tttcactttaatttattacggtttttcttgatttttgttttattctatgcaataataaatttaaagaagaaaggaggtagcaagctgatgagtcaacttgggaataaagaagtgatggctgaaaatattaaatctttaatgaaacagaatggtatagaccgaaagcaattgagtgacgatttacaaataagttatacgactatatctgactggattaatgcgaaaacgtatccccgaattgataaaattgagctgctagcgaattactttagagtaaataaatcagatttagttgaaagtcagaagtgcccgactgaaacgccggctttggttccaatattgggaaaagtcgcagcgggcaagccagagtatgctcaagaagatattgaagggtacatgactttgccccctggtaaagtatcgaataagggccttatgtatttaaaagtgaaatctgactcaatggacaaaatgttccccgtgggttcgtatgttcttgttgatacagaagctaccattgataatggcaatgtggctgttgtgaaaattaatggtaatgaagccactttaaaaaaagtaaaattcaataatgataaagaggaaattatactcatcccagaatcaacaaatgacatacatactcctgctttttaccaagcaaatgaaacagacgtatttttgataggtaaagttatcgggatgtacatggatttataa

SEQ ID NO: 6576 - protein, 209 aa, Alloiococcus otitidis
MSQLGNKEVMAENIKSLMKQNGIDRKQLSDDLQISYTTISDWINAKTYPRIDKIELLANYFRVNKSDLVESQKCPTETPALVPILGKVAAGKPEYAQEDIEGYMTLPPGKVSNKGLMYLKVKSDSMDKMFPVGSYVLVDTEATIDNGNVAVVKINGNEATLKKVKFNNDKEEIILIPESTNDIHTPAFYQANETDVFLIGKVIGMYMDL

SEQ ID NO: 6577 - DNA, 717 bp, Alloiococcus otitidis; identical to SEQ ID NO: 6575
  CDS (28)..(714)

SEQ ID NO: 6578 - protein, 229 aa, Alloiococcus otitidis
MIFVLFYAIINLKKKGGSKLMSQLGNKEVMAENIKSLMKQNGIDRKQLSDDLQISYTTISDWINAKTYPRIDKIELLANYFRVNKSDLVESQKCPTETPALVPILGKVAAGKPEYAQEDIEGYMTLPPGKVSNKGLMYLKVKSDSMDKMFPVGSYVLVDTEATIDNGNVAVVKINGNEATLKKVKFNNDKEEIILIPESTNDIHTPAFYQANETDVFLIGKVIGMYMDL

SEQ ID NO: 6579 - DNA, 675 bp, Alloiococcus otitidis
  CDS (4)..(672)
agaatggaaataggaaaacggatgaagagcagaagaaaagaattgaaattaacagccgatcagattgctaaagcaattggtgtttctcgatctaatgtatatagatatgaaaacggggatattgaaaatttacctttagagatactaaaacctttgagcagtattttaaaaaccacccctcaatatttaatgggatgggatgataatatttcagctgatttcgccactatctacaatcaactcgaaccaccaagacaagagaaagtatataattatgcaaacaaccaactgatagaacaaaaccaagtgcaggaagcaacaacggtttatgtaacgtctaaattatcagcaggccctggcgtaatagatttagatcctcgaaacgtggaagaagtacaatatgacggttatgtaccacaccatgatttagctttccaagtagccggcgactcaatggagcctctgtttgaagatggggagattgtctttgtcgaaaggacagaagatatttatagtggccaagtcatagctgttcaaattaatgaagagtcttttatcaaaaaagcttacatagaaaatgaccaactaaggttagtatcgttaaactctatgtatgaggatattttggctgatggaactgataatatccgtgtcgttggacgagttattttataa

SEQ ID NO: 6580 - protein, 223 aa, Alloiococcus otitidis
MEIGKRMKSRRKELKLTADQIAKAIGVSRSNVYRYENGDIENLPLEILKPLSSILKTTPQYLMGWDDNISADFATIYNQLEPPRQEKVYNYANNQLIEQNQVQEATTVYVTSKLSAGPGVIDLDPRNVEEVQYDGYVPHHDLAFQVAGDSMEPLFEDGEIVFVERTEDIYSGQVIAVQINEESFIKKAYIENDQLRLVSLNSMYEDILADGTDNIRVVGRVIL

SEQ ID NO: 6581 - DNA, 702 bp, Alloiococcus otitidis
  CDS (91)..(699)
gaggagttatcaatgcagacgttcaaaaaaatagttatctactttttgctatggtcttttgggatccttactttcccggttcttctcttcttgaattggaaaaataaagacaaaagctacaagaactaccttgtcgcttccgggatcgggtttgggatgtttttaatcgttctgcccttcacagacgaatcagatacagcttccacacaagaggtggctcaagaagaagaacaagctgagggagacgatgaagaggaggacgaagcggaagatactgaagaggaaaaagacgaagaaaacgaagaaccagaagaggaacaggggctagaagataaagtcaaagctgtagcggatgatgtcctagatgatcgagccacagaagccagatatgtggaagatacaggatttattagcattgaattccaaatacgcgattcttttacgaataatcaaagaaaatttgggtttttaagtgatgcccatgattacactgaacaaattcaaaatgaagattttgaccgcatccttttttctggcttttttgatacccgtgatcaatatggcaatgttgaaaacactaaggtcgctacccttgatatgaataaagagacagtggataaaatcaattttgataatattattcctgacgatatggaaaacatagcggatgaaatctattttcatcctgctctactcgattaa

SEQ ID NO: 6582 - protein, 203 aa, Alloiococcus otitidis
MNWKNKDKSYKNYLVASGIGFGMFLIVLPFTDESDTASTQEVAQEEEQAEGDDEEEDEAEDTEEEKDEENEEPEEEQGLEDKVKAVADDVLDDRATEARYVEDTGFISIEFQIRDSFTNNQRKFGFLSDAHDYTEQIQNEDFDRILFSGFFDTRDQYGNVENTKVATLDMNKETVDKINFDNIIPDDMENIADEIYFHPALLD

SEQ ID NO: 6583 - DNA, 702 bp, Alloiococcus otitidis; identical to SEQ ID NO: 6581
  CDS (13)..(699)

SEQ ID NO: 6584 - protein, 229 aa, Alloiococcus otitidis
MQTFKKIVIYFLLWSFGILTFPVLLFLNWKNKDKSYKNYLVASGIGFGMFLIVLPFTDESDTASTQEVAQEEEQAEGDDEEEDEAEDTEEEKDEENEEPEEEQGLEDKVKAVADDVLDDRATEARYVEDTGFISIEFQIRDSFTNNQRKFGFLSDAHDYTEQIQNEDFDRILFSGFFDTRDQYGNVENTKVATLDMNKETVDKINFDNIIPDDMENIADEIYFHPALLD

SEQ ID NO: 6585 - DNA, 1215 bp, Alloiococcus otitidis
  CDS (13)..(1212)
ggagtttttaaaatggcttttttgaagaaagtaaaatcgggttggaaatatcgcatttcctacaaagatccaatgacgcaagaactgaagcaaaaatcaaagagtggctttgccactaaaaaagaggcccaacttcacgcttcaaaaacgaaagagaagttggagcagggattgaacttcagcaagaatatttcttttattgattactttgaggagtggtacaaaacctacaaaaaagataaattttcacccagctataacaaggacgtggaaacagctattgagcaagcccgggattatttcgggcaaacgaaattaaaaaatataacgaaacacgtctatcagaaatttcttaacgactttgggcaaggccgcgccacttccacggtgaaaaagaaacatgtttttattggggagtgtttgaccgacgcctttcatgaaggcctgattcccaaagacccaacttataaagtaacgattacgggaacgaaagatcgttacgaagaagcggacatgtatctcaattacaatgaagcaattaaattgtccgagcaattgaaacaaaacctgaaaccaacttatacctcaagatacatgatcttgctagcgctagcgactggtttgcggtttagtgaaattgttggattggcttgggatgacattgattttgagcaacatacgctatcggtcaatcgtatgttcgattaccggacaagtcaacaatttcagaaaccgaagtccgaaaagtccaagcgaaccattgcgctggataaagcaaccgtagcatggcttaagcggtataaattgcaagtgcagaaggattaccctgaatacatctttatggacaaattcggccaacacgtgtccaatagtggcgtgaataaggcattaaaaaaagcctgctcaaaggcaggcgtgaaagagatcaccttccacaaattacggcatacacactgctccattttgctgtacaaaggcattaacatcaagtacatctcgaaaagattgggccactcatctacccaaattacttatgaggtgtacggtcatatcctagatgagttggatcagcaagaagcgcagcgtgtggatgatatcatggcagaaattacatctgctggagtgcataatttttatgcattgttatgcattctgtcgttttccattttcaggaatgccgtcatatcagtgtttatggcttctattgttttctga

SEQ ID NO: 6586 - protein, 400 aa, Alloiococcus otitidis
MAFLKKVKSGWKYRISYKDPMTQELKQKSKSGFATKKEAQLHASKTKEKLEQGLNFSKNISFIDYFEEWYKTYKKDKFSPSYNKDVETAIEQARDYFGQTKLKNITKHVYQKFLNDFGQGRATSTVKKKHVFIGECLTDAFHEGLIPKDPTYKVTITGTKDRYEEADMYLNYNEAIKLSEQLKQNLKPTYTSRYMILLALATGLRFSEIVGLAWDDIDFEQHTLSVNRMFDYRTSQQFQKPKSEKSKRTIALDKATVAWLKRYKLQVQKDYPEYIFMDKFGQHVSNSGVNKALKKACSKAGVKEITFHKLRHTHCSILLYKGINIKYISKRLGHSSTQITYEVYGHILDELDQQEAQRVDDIMAEITSAGVHNFYALLCILSFSIFRNAVISVFMASIVF

SEQ ID NO: 6587 - DNA, 858 bp, Alloiococcus otitidis
  CDS (10)..(855)
ggaattttaatggaaattaaccagcaatttttagacaagtctagacaggcctttgccaatgaccgtgctttccggattgcccaaagagccgctaccaacactggtttgttggagtctagcattaaccgcagtgaagacgatagtaaccgccacaccttcaatattgacctaaccgaaaccgaaatccggtcccaaaaccagtcaggacgttgctggatcttcgcagctatgaacgtcatggaatacaaggttgcccaaaagttcaacctcaaggaatttgaaatttcccaatcctacatttacttttatgacaagttggaaagatgtaactacttctttgagtctatcctaaataccctggacgaagacttggacagccgactccttgcccacctcttaaccgatccaatgggagatgggggtcagtgggacatggtcaagaacatcatcaataaatacggtattgtccctaaagctgccatgccggaatccaaaaactcttcaagctctggccagatgaataactacttgactaaaatcttacggatggatgctaaaaacttgcgccaagctcacgctgaaggcaagtcgattgaagacttgcgcgacttagtccaagcctacatggtggatatctacaacgccctatctatttctttgggaactcctcctgaaaaagtggactttgaaacccgggacaaggacaacagttcatctcctacaagaacattactcctaaagaattcttcgacctcctggacatggacttggacgactatgtttccattatcaatgccccaaccaaagacaagccttactacaagtcttacacagttgaatacctgggtaatgtggtag

SEQ ID NO: 6588 - protein, 282 aa, Alloiococcus otitidis
MEINQQFLDKSRQAFANDRAFRIAQRAATNTGLLESSINRSEDDSNRHTFNIDLTETEIRSQNQSGRCWIFAAMNVMEYKVAQKFNLKEFEISQSYIYFYDKLERCNYFFESILNTLDEDLDSRLLAHLLTDPMGDGGQWDMVKNIINKYGIVPKAAMPESKNSSSSGQMNNYLTKILRMDAKNLRQAHAEGKSIEDLRDLVQAYMVDIYNALSISLGTPPEKVDFETRDKDNSSSPTRTLLLKNSSTSWTWTWTTMFPLSMPQPKTSLTTSLTQLNTWVMW

SEQ ID NO: 6589 - DNA, 648 bp, Alloiococcus otitidis
  CDS (163)..(645)
aacccgggacaaggacaacagttcatctcctacaagaacattactcctaaagaattcttcgacctcctggacatggacttggacgactatgtttccattatcaatgccccaaccaaagacaagccttactacaagtcttacacagttgaatacctgggtaatgtggtagaaggtgagatagtccgctatgtcaacctaccgattgatgagatgaaaaaagccatcttgaaacaactgcaagatgatgagcccgtttggtttggctgttttgttggccagttcttcaaccggtctggctcccgcctatacctgactactgccaatgtcttggacctcttcaatgttgattacgactttgacaaggaagaccggcttgactaccacgaatccctcatgacccacgccatggtctttatgggagctgactatgacgaaaccaacaacaaaattaaccgctacaaggtcgaaaacacctggggtaaaaactccggccacaagggttacttggtgatgagtgacgaatggttcgaccagtacatgtaccaagcccttatccacaaaaagcacctgccacaagaagttattgatgcctaccaagaagagcccatcaagttgaaaccatgggatccaatggggtcactagcttaa

SEQ ID NO: 6590 - protein, 161 aa, Alloiococcus otitidis
MVEGEIVRYVNLPIDEMKKAILKQLQDDEPVWFGCFVGQFFNRSGSRLYLTTANVLDLFNVDYDFDKEDRLDYHESLMTHAMVFMGADYDETNNKINRYKVENTWGKNSGHKGYLVMSDEWFDQYMYQALIHKKHLPQEVIDAYQEEPIKLKPWDPMGSLA

SEQ ID NO: 6591 - DNA, 648 bp, Alloiococcus otitidis; identical to SEQ ID NO: 6589
  CDS (73)..(645)

SEQ ID NO: 6592 - protein, 191 aa, Alloiococcus otitidis
MDLDDYVSIINAPTKDKPYYKSYTVEYLGNVVEGEIVRYVNLPIDEMKKAILKQLQDDEPVWFGCFVGQFFNRSGSRLYLTTANVLDLFNVDYDFDKEDRLDYHESLMTHAMVFMGADYDETNNKINRYKVENTWGKNSGHKGYLVMSDEWFDQYMYQALIHKKHLPQEVIDAYQEEPIKLKPWDPMGSLA

SEQ ID NO: 6593 - DNA, 564 bp, Alloiococcus otitidis
  CDS (160)..(561)
tcttgtaagcttgtccctttagctagccaagtggacttcttgccacttaactatttgaggactatactaggggtaaagaaaggaagtgttttcatgaagcgtaggctacccctttatgcggtggcaacggctttgattgtggctctttccctgcttattttgatccctgtgccagggtctaatggcttcgtttccttgatcgatgcgggaattgtcgttatgggcctcctctttggtccgggaccaggcctggctgttggggccttgtcaggagccttggttgacctcttgtccggttatgcccagtggatccctttctcagcccttgtccacggactacaaggctatattgttggattagccaggggcagggccactaaggaccaagtagggcttttaatcgcctcctccgtctttatggtagtgggctactttatcagtaatattatcctgtatggaactatggctactggtatagctggtttaataccagatgcctttcagacagcgattggcctggtcctaggctaccctttgagccgtcgtttagagaagccagcctaa

SEQ ID NO: 6594 - protein, 134 aa, Alloiococcus otitidis
MIPVPGSNGFVSLIDAGIVVMGLLFGPGPGLAVGALSGALVDLLSGYAQWIPFSALVHGLQGYIVGLARGRATKDQVGLLIASSVFMVVGYFISNIILYGTMATGIAGLIPDAFQTAIGLVLGYPLSRRLEKPA

SEQ ID NO: 6595 - DNA, 564 bp, Alloiococcus otitidis; identical to SEQ ID NO: 6593
  CDS (121)..(561)

SEQ ID NO: 6596 - protein, 147 aa, Alloiococcus otitidis
MATALIVALSLLILIPVPGSNGFVSLIDAGIVVMGLLFGPGPGLAVGALSGALVDLLSGYAQWIPFSALVHGLQGYIVGLARGRATKDQVGLLIASSVFMVVGYFISNIILYGTMATGIAGLIPDAFQTAIGLVLGYPLSRRLEKPA

SEQ ID NO: 6597 - DNA, 564 bp, Alloiococcus otitidis; identical to SEQ ID NO: 6593
  CDS (94)..(561)

SEQ ID NO: 6598 - protein, 156 aa, Alloiococcus otitidis
MKRRLPLYAVATALIVALSLLILIPVPGSNGFVSLIDAGIVVMGLLFGPGPGLAVGALSGALVDLLSGYAQWIPFSALVHGLQGYIVGLARGRATKDQVGLLIASSVFMVVGYFISNIILYGTMATGIAGLIPDAFQTAIGLVLGYPLSRRLEKPA

SEQ ID NO: 6599 - DNA, 564 bp, Alloiococcus otitidis; identical to SEQ ID NO: 6593
  CDS (55)..(561)

SEQ ID NO: 6600 - protein, 169 aa, Alloiococcus otitidis
MRTILGVKKGSVFMKRRLPLYAVATALIVALSLLILIPVPGSNGFVSLIDAGIVVMGLLFGPGPGLAVGALSGALVDLLSGYAQWIPFSALVHGLQGYIVGLARGRATKDQVGLLIASSVFMVVGYFISNIILYGTMATGIAGLIPDAFQTAIGLVLGYPLSRRLEKPA

SEQ ID NO: 6601 - DNA, 564 bp, Alloiococcus otitidis; identical to SEQ ID NO: 6593
  CDS (40)..(561)

SEQ ID NO: 6602 - protein, 174 aa, Alloiococcus otitidis
MPLNYLRTILGVKKGSVFMKRRLPLYAVATALIVALSLLILIPVPGSNGFVSLIDAGIVVMGLLFGPGPGLAVGALSGALVDLLSGYAQWIPFSALVHGLQGYIVGLARGRATKDQVGLLIASSVFMVVGYFISNIILYGTMATGIAGLIPDAFQTAIGLVLGYPLSRRLEKPA

SEQ ID NO: 6603 - DNA, 564 bp, Alloiococcus otitidis; identical to SEQ ID NO: 6593
  CDS (31)..(561)

SEQ ID NO: 6604 - protein, 177 aa, Alloiococcus otitidis
MDFLPLNYLRTILGVKKGSVFMKRRLPLYAVATALIVALSLLILIPVPGSNGFVSLIDAGIVVMGLLFGPGPGLAVGALSGALVDLLSGYAQWIPFSALVHGLQGYIVGLARGRATKDQVGLLIASSVFMVVGYFISNIILYGTMATGIAGLIPDAFQTAIGLVLGYPLSRRLEKPA

SEQ ID NO: 6605 - DNA, 702 bp, Alloiococcus otitidis
  CDS (22)..(699)
ccaaataaaaggaggagaaatatgaaactagtttttatccgccatggccaaagtcaactcaaccgggccaatgttttcacaggttggttggaccccaaattgtctgaccaaggagtagaagaggcccagcaagctggcttgagcttgaaagaaacagggatccactttgaccgagtccatacttcagtcttaacccgggctcttgagaccagttattatgtcttagaccaactggaccagctctacctgcccatccagaaaagttggcggttaaatgaacgtcactatggtgccctccaaggcttaaacaaggcgaaaactgctgaaaaatacgggcaagatcaagtccacacctggcgccggagctatgccacccggccaccccaaggtcagggccaaggctcttttgaccgacgttacaaggatttggaccaagatttactaccagctggagaatcactcaaggataccttgaaacggaccctaccctactgggaagaccagatcgctcctgacttaaaggctggtaaaaatgtcatcgtcatcgcccacggcaacagtcttcggtctttaaccaagtacttggagaatatttccgatgaggctattgcccaacatgaaatcgcaacgggccagcccattatctacgacctagatgaccaattccacattaaaaacaagcaggtcttaagccaaaactag

SEQ ID NO: 6606 - protein, 226 aa, Alloiococcus otitidis
MKLVFIRHGQSQLNRANVFTGWLDPKLSDQGVEEAQQAGLSLKETGIHFDRVHTSVLTRALETSYYVLDQLDQLYLPIQKSWRLNERHYGALQGLNKAKTAEKYGQDQVHTWRRSYATRPPQGQGQGSFDRRYKDLDQDLLPAGESLKDTLKRTLPYWEDQIAPDLKAGKNVIVIAHGNSLRSLTKYLENISDEAIAQHEIATGQPIIYDLDDQFHIKNKQVLSQN

SEQ ID NO: 6607 - DNA, 1197 bp, Alloiococcus otitidis
  CDS (7)..(1194)
atgaggatgcaagaagcttacattgttgcttacggccgttctgctgttgctaaagggaaagcgtcaggagcccttttctactcaagacctgatgacatcgcagcccaagtattaaagggcaccattgaccgtattgaaggtaattttgaccctgataccattgatgatgtgattgtgggttgttccactccagaaggacctcaaggcactaacattgcccgaactattgccttaagagcaggcttgtcccaaaaagttcctggacaaaccgttaaccggttctgttcatctggcttgcaaaccattgcaactgcagctaactcgattattgctggtcaaaacgatattgtcgctgcgggtggggtcgagtttatgtcctccctaccaatgggtgggaacgaaccaaccaacaacccaacccttcaagatgaaggtcctaaaactggggttcctatggggatcacagctgagaatgtagctgacaagtacaacatttcccgggaagaccaagatgcttttgcggttgaatctcaccgccgggctgcagcagctcaagatgcaaacttgtttgatgaaattatcccggtccaagtgcaaaaacctaaatatactgccaatggtgttgaaatgaccactgaaactttcgacactgatgaattggtcagacggggcactagcatggaaaccctagccaaattgccaactgccttccgtcgtaacggtactgttactcctggtcaatcgtcacccattactgacggtgctggttttgtggtcttgatgtcaggcgacaaggttaaagaattgggtgtcaaaccaattgccaaattcgttggctacaaggtagctggtgtctcaccagaaatcatggggattggtccggttgaagcagttcctgcagttatgaaacaaactggcctaacactggaagacatggacttgattgagtttaatgaagccttcgcagcacaaattgtcgcttccatgcgggaattaaacatgaatccagaagtcaccaacgttaacggtggggccatcgctcttggtcacccacttggggcaaccggtgctatcgtcactgctaagttgctctccgaaatgaaacgtcgcaaagaaagtaaatacggcctcgttaccatgtgtattggtgggggtatgggggccgctggtatctttgaatacgtcggtgagcgttaa

SEQ ID NO: 6608 - protein, 396 aa, Alloiococcus otitidis
MQEAYIVAYGRSAVAKGKASGALFYSRPDDIAAQVLKGTIDRIEGNFDPDTIDDVIVGCSTPEGPQGTNIARTIALRAGLSQKVPGQTVNRFCSSGLQTIATAANSIIAGQNDIVAAGGVEFMSSLPMGGNEPTNNPTLQDEGPKTGVPMGITAENVADKYNISREDQDAFAVESHRRAAAAQDANLFDEIIPVQVQKPKYTANGVEMTTETFDTDELVRRGTSMETLAKLPTAFRRNGTVTPGQSSPITDGAGFVVLMSGDKVKELGVKPIAKFVGYKVAGVSPEIMGIGPVEAVPAVMKQTGLTLEDMDLIEFNEAFAAQIVASMRELNMNPEVTNVNGGAIALGHPLGATGAIVTAKLLSEMKRRKESKYGLVTMCIGGGMGAAGIFEYVGER

SEQ ID NO: 6609 - DNA, 1197 bp, Alloiococcus otitidis; identical to SEQ ID NO: 6607
  CDS (1)..(1194)

SEQ ID NO: 6610 - protein, 398 aa, Alloiococcus otitidis
MRMQEAYIVAYGRSAVAKGKASGALFYSRPDDIAAQVLKGTIDRIEGNFDPDTIDDVIVGCSTPEGPQGTNIARTIALRAGLSQKVPGQTVNRFCSSGLQTIATAANSIIAGQNDIVAAGGVEFMSSLPMGGNEPTNNPTLQDEGPKTGVPMGITAENVADKYNISREDQDAFAVESHRRAAAAQDANLFDEIIPVQVQKPKYTANGVEMTTETFDTDELVRRGTSMETLAKLPTAFRRNGTVTPGQSSPITDGAGFVVLMSGDKVKELGVKPIAKFVGYKVAGVSPEIMGIGPVEAVPAVMKQTGLTLEDMDLIEFNEAFAAQIVASMRELNMNPEVTNVNGGAIALGHPLGATGAIVTAKLLSEMKRRKESKYGLVTMCIGGGMGAAGIFEYVGER

SEQ ID NO: 6611 - DNA, 1752 bp, Alloiococcus otitidis
  CDS (70)..(1749)
ggaaaggggttgttatctgccacgacgtttcaggctttgtgcggtaaccggattggaacctttactggtatggacattgcctaccgggcagaacaagaaggcctagctgttaacgaagtcgacaccctgtctggtgaaattcttggtcgccctcggatgggaaccaaccgcctctctgactttgtcgggatcgatatcggctaccatgtctctcacggcctaaaagatgaccctgaagaagcagaatactttaaacttcctcaaacacctgaatacttggttgaccaaggttggttgggtgacaagtcaggccaaggcttctacaaaaaacaagaagacgggtcaaaacttatctttgacctagagaaaaaggactatgtccaaccgaaagacgttaactttgacattttaaacaacctcggcaaggacttgaaacacaacttcaacactatctttgaagcagaagacgaaattggtctcttcctgtggaaaaccttgcggaacctcttcttctactctgctattaacgtgggtaaggccactgacgaatacaaaaacattgaccgagcaatggtttggggctacaactggaaagttggaccattccaagcttgggacttaatcggtgttgaacgcgtagccaaacgaattgaagaggaaattgacgacatcccaggcagtgacactgaattgcctgaatgggtgaaaggccgaactgagccgttctacaaagaaggcgaaggcatttccaatgttgccgaagttcaaagcttcgtcgctaagactctttgggaaaaagagggatctagccggctagatgtgacggaagatggcgtcttactcctacaaatgctaacaccgaacaacaccttaagtagcgacttccaaaaagatattattgaagccgtcgatgttttagaagaggaagactacaaaggcttggtccttcacacacctggtcctcacttctcttacggggctaatctcaacttgatgaaagaagccatcgacaacaaggcgcaagacactgaagttcgtcaaggaacggaagaactccaccaagccgtttctcgcttgaaatacgcagcgaaaccagttgtcgcagctgttgctggtcgggcattaggtgggggagcagaacttctcttacacaccccattcgttgtggctgcagctgaatcctacatcggtctagtagaggttggggttggcttgatcccaggtggagcaggaacagtggaattagctgaccgtatctaccgtcaaaacttgactaaaccagagaagatcgctcgcttgtccgcaaccctcacaaccattgcaacaggtagcctgtctaaaaatgcttatgatgctgttcaaaaaggcttcctacgtgagactgaccaaattgtccaaaatgaagacttggttgtagctgcagcgatcgacaaagttcggtctgaaagcaagtacaactacattccacaatacaaggccaactacagtgtcctaggacgagactttatcgccttagcccaatctagtttagaagccatgcgtgatgggaacaatgcatctgaccacgatgtcttagttggaactaagattgctgaagttctagctggtggtaatatccctggtcaaacagtagtcaacgaagaccaactcctcaaaattgaggtggataacttcgtggctgtcagcaaagaagacaaaacttacgaccggattaaacacatgctagaaaccaacaaaccattgcggaactaa

SEQ ID NO: 6612 - protein, 560 aa, Alloiococcus otitidis
MDIAYRAEQEGLAVNEVDTLSGEILGRPRMGTNRLSDFVGIDIGYHVSHGLKDDPEEAEYFKLPQTPEYLVDQGWLGDKSGQGFYKKQEDGSKLIFDLEKKDYVQPKDVNFDILNNLGKDLKHNFNTIFEAEDEIGLFLWKTLRNLFFYSAINVGKATDEYKNIDRAMVWGYNWKVGPFQAWDLIGVERVAKRIEEEIDDIPGSDTELPEWVKGRTEPFYKEGEGISNVAEVQSFVAKTLWEKEGSSRLDVTEDGVLLLQMLTPNNTLSSDFQKDIIEAVDVLEEEDYKGLVLHTPGPHFSYGANLNLMKEAIDNKAQDTEVRQGTEELHQAVSRLKYAAKPVVAAVAGRALGGGAELLLHTPFVVAAAESYIGLVEVGVGLIPGGAGTVELADRIYRQNLTKPEKIARLSATLTTIATGSLSKNAYDAVQKGFLRETDQIVQNEDLVVAAAIDKVRSESKYNYIPQYKANYSVLGRDFIALAQSSLEAMRDGNNASDHDVLVGTKIAEVLAGGNIPGQTVVNEDQLLKIEVDNFVAVSKEDKTYDRIKHMLETNKPLRN

SEQ ID NO: 6613 - DNA, 1752 bp, Alloiococcus otitidis; identical to SEQ ID NO: 6611
  CDS (10)..(1749)

SEQ ID NO: 6614 - protein, 580 aa, Alloiococcus otitidis
MLSATTFQALCGNRIGTFTGMDIAYRAEQEGLAVNEVDTLSGEILGRPRMGTNRLSDFVGIDIGYHVSHGLKDDPEEAEYFKLPQTPEYLVDQGWLGDKSGQGFYKKQEDGSKLIFDLEKKDYVQPKDVNFDILNNLGKDLKHNFNTIFEAEDEIGLFLWKTLRNLFFYSAINVGKATDEYKNIDRAMVWGYNWKVGPFQAWDLIGVERVAKRIEEEIDDIPGSDTELPEWVKGRTEPFYKEGEGISNVAEVQSFVAKTLWEKEGSSRLDVTEDGVLLLQMLTPNNTLSSDFQKDIIEAVDVLEEEDYKGLVLHTPGPHFSYGANLNLMKEAIDNKAQDTEVRQGTEELHQAVSRLKYAAKPVVAAVAGRALGGGAELLLHTPFVVAAAESYIGLVEVGVGLIPGGAGTVELADRIYRQNLTKPEKIARLSATLTTIATGSLSKNAYDAVQKGFLRETDQIVQNEDLVVAAAIDKVRSESKYNYIPQYKANYSVLGRDFIALAQSSLEAMRDGNNASDHDVLVGTKIAEVLAGGNIPGQTVVNEDQLLKIEVDNFVAVSKEDKTYDRIKHMLETNKPLRN

SEQ ID NO: 6615 - DNA, 615 bp, Alloiococcus otitidis
  CDS (34)..(612)
caagacctgttagattacagtggaggtaaaagaatgagtataaataaagttacagttttaggtgccggtgcaatgggaagccaaattgctgcccacctcattaatgttggtttaaaagttcaattactagacatcgtagtggacgaagataaccccaacaagctagctaaggatgccctaggacggattacccaccgtaaaaaaggcttactctatgataataacctagcagttaatttaagcattgggaactttaaggatgacctcaaagaagcaaacgattctgacctctatattgaagcggtcagcgaagagctagatattaagcacgacatttggggtaaagttgctaaagttgccaaagattcagctatcttagctaccaacacttctggtattcccatagctgacattgcggaaccttttgatccagatttccaaaaacgtttcttgggactacacttctttaacccagtccgtgtcatgaaattggttgaaatcatcaaacacaagggaactgatgaaaaatatgtccaagagttgtccgatttcactacctacaccctagggaaaggggttgttatctgccacgacgtttcaggctttgtgcggtaa

SEQ ID NO: 6616 - protein, 193 aa, Alloiococcus otitidis
MSINKVTVLGAGAMGSQIAAHLINVGLKVQLLDIVVDEDNPNKLAKDALGRITHRKKGLLYDNNLAVNLSIGNFKDDLKEANDSDLYIEAVSEELDIKHDIWGKVAKVAKDSAILATNTSGIPIADIAEPFDPDFQKRFLGLHFFNPVRVMKLVEIIKHKGTDEKYVQELSDFTTYTLGKGVVICHDVSGFVR

SEQ ID NO: 6617 - DNA, 675 bp, Alloiococcus otitidis
  CDS (28)..(672)
ctacattgtaaaaggagagggataattatggccgttgcactcagtaaagaagaactaaacaatattattgcagaacgtgtggcaaaagaattgcaaaatggagacgttgtcaaccttggtattggggtcccaaccctggtagctaactatgtgccaagtgatatcgatgtcaccctacactccgagaatgggatcctaaacttagggggtagcccagctgaagaccaggttgacccaaatattatcaatgctggtggccaacccgctagtgtggatgtcggaggagccttcttacacagtgcggattcctttggcctagtacgtgggggacacgttgatataaccgtcttaggtgccctccaggtcgatgaaaaaggcaatatcgccaactacaagattccaggcaagtatgtcccaggtatggggggcgctatggacctagttgctggtgctaagcgggttatcgtggccatggaacacaccaacaaaggcaaccacaagatcctaagacaatgtaccttgccgctaacaggtgaaggtcgggtcagcttgattgtaactgaaatgggcgtttttgaaccgactgaacgtggtttggttgttgttgaaaccaaccctgactttacaaacgaagaaattcaagaagcaactgaagcagaattgatctttgaataa

SEQ ID NO: 6618 - protein, 215 aa, Alloiococcus otitidis
MAVALSKEELNNIIAERVAKELQNGDVVNLGIGVPTLVANYVPSDIDVTLHSENGILNLGGSPAEDQVDPNIINAGGQPASVDVGGAFLHSADSFGLVRGGHVDITVLGALQVDEKGNIANYKIPGKYVPGMGGAMDLVAGAKRVIVAMEHTNKGNHKILRQCTLPLTGEGRVSLIVTEMGVFEPTERGLVVVETNPDFTNEEIQEATEAELIFE

SEQ ID NO: 6619 - DNA, 714 bp, Alloiococcus otitidis
  CDS (58)..(711)
ctaagaaagttagaaaagaaaaggatattgaaagggaaaaacggtggtggatacaaaatgactgataaaatcatttcaaagcaagatgcgattaaaaagataaaagacggttctagtgtcatgatcggtggttttgggggtgttggttgcccttaccagttaattgacgagttaatcgaacaaggggtaaaagacattaccatgatcgttaacgacaccgcaactgctgaaattggtgtgggtaagttagtagccaacaagcaagttaaaactttaaatgctacccacattgggaccaacactgaatctgtccgtcagatgaacgaaggggaaatggaagtcacccttatcccccaagggactctagctgaacgaattcgggcggcaggttacggtatcggtggtttcttgaccccaactggtgttggaacagaagttgctgaaggtaaagatagcttccacattgatggtaaagactacatccttgaaaaacctttatttgcggactatgccttgatttatgctgaccgggctgacgaaaaagggaacttggactaccacggggtaacaccaaactttaacgttgtcatggcagcagcaggtacggaagttattgtcgaagccaaggaagttgttaaagaaggggaactcaacccagaccacatcaaagttcctcacgtttacgttgactacattgtaaaaggagagggataa

SEQ ID NO: 6620 - protein, 218 aa, Alloiococcus otitidis
MTDKIISKQDAIKKIKDGSSVMIGGFGGVGCPYQLIDELIEQGVKDITMIVNDTATAEIGVGKLVANKQVKTLNATHIGTNTESVRQMNEGEMEVTLIPQGTLAERIRAAGYGIGGFLTPTGVGTEVAEGKDSFHIDGKDYILEKPLFADYALIYADRADEKGNLDYHGVTPNFNVVMAAAGTEVIVEAKEVVKEGELNPDHIKVPHVYVDYIVKGEG

SEQ ID NO: 6621 - DNA, 714 bp, Alloiococcus otitidis; identical to SEQ ID NO: 6619
  CDS (28)..(711)

SEQ ID NO: 6622 - protein, 228 aa, Alloiococcus otitidis
MKGKNGGGYKMTDKIISKQDAIKKIKDGSSVMIGGFGGVGCPYQLIDELIEQGVKDITMIVNDTATAEIGVGKLVANKQVKTLNATHIGTNTESVRQMNEGEMEVTLIPQGTLAERIRAAGYGIGGFLTPTGVGTEVAEGKDSFHIDGKDYILEKPLFADYALIYADRADEKGNLDYHGVTPNFNVVMAAAGTEVIVEAKEVVKEGELNPDHIKVPHVYVDYIVKGEG

SEQ ID NO: 6623 - DNA, 1197 bp, Alloiococcus otitidis
  CDS (7)..(1194)
ataaggatgcaagaagcttatattgttgcttatggccgttctgccgttgccaaagggaaaccatcaggagccctttaccactctagaccagatgacattgcggctcaggttctaaaaggaactattgaccgaattgaaggggactttgacccaactactattgaagatgtcattgtcggttgctccactccagaaggcccacaagggaataacgttgcccgaaccattgccttaagagctggcttgtcccaaaaggttcctggacaaaccgttaaccggttctgctcatctggtttacaaaccatcgcaacagcagctaactctattattgctggccaaaacgacattgtagctgctggtggggttgaatttatgtcctcccttccaatgggtgggaacgaagcgaccaataacccaacccttcaagaagaaggaccaaaaactggtatcccaatggggatcactgctgaaaacgtagccgacaaatataacatttctcgtgaagaccaagatgcctttgcggttgaatctcaccgccgagcagctgctgctcaagaggctggtagattcgacgaaatcatcccggtcaatgcccaaacccctaaatacactgaaaacggtgtggaaatgacaacaaccgtctttgacaaagacgaaactattcgtcctagctcaagcatggaaagcttggctaaattgccaactgccttccgtcgcaacggtactgttacacctggtcaatcttcacccattactgacggtgctggctttgtggtcttgatgtctggtgataaggtcaaagaactcggcgtcaaaccaattgctaaatttgttggattcaaagttgctggtgtctcacctgaaatcatggggattggtccagtagaagcagttcctgcagttatgaaattaacaggacttaaattggaagacatggacttgattgaatttaacgaagcatttggttctcaaatcattgcttccatgcgtgaattgaacatggaccctgagattaccaacgtcaacggtggtgcgattgctcttggtcacccactaggggcaaccggtgctatcatgacagctaaaattctctcagaaatgaaacgtcgtaaagacagcaaatacggcttgatcaccatgtgtatcggtggcggtatgggtgctgctggtatccttgaatacgttggtgaacggtaa

SEQ ID NO: 6624 - protein, 396 aa, Alloiococcus otitidis
MQEAYIVAYGRSAVAKGKPSGALYHSRPDDIAAQVLKGTIDRIEGDFDPTTIEDVIVGCSTPEGPQGNNVARTIALRAGLSQKVPGQTVNRFCSSGLQTIATAANSIIAGQNDIVAAGGVEFMSSLPMGGNEATNNPTLQEEGPKTGIPMGITAENVADKYNISREDQDAFAVESHRRAAAAQEAGRFDEIIPVNAQTPKYTENGVEMTTTVFDKDETIRPSSSMESLAKLPTAFRRNGTVTPGQSSPITDGAGFVVLMSGDKVKELGVKPIAKFVGFKVAGVSPEIMGIGPVEAVPAVMKLTGLKLEDMDLIEFNEAFGSQIIASMRELNMDPEITNVNGGAIALGHPLGATGAIMTAKILSEMKRRKDSKYGLITMCIGGGMGAAGILEYVGER

SEQ ID NO: 6625 - DNA, 2349 bp, Alloiococcus otitidis
  CDS (103)..(2346)
acaagcgaaaaaagttggatatatttcagagtaatatataaaattaaatgtggaggtaatagaatgagtataaataaagttacagttttaggtgcaggagcaatgggaagccaaattgcagcccacctggttaatgttggtttgaaagttcaattgttagatattgtggttgatgaagacgatcctaacaaattagcaaaagaagctaagggccgtatcacccaccgcaaaaagggtctcctttacgacaatgagttagcagctaacttaagcatcggaaactttaacgatgacctcaaagaggcaaacgactctgacttatacatcgaagcagttagtgaaaaacttgaaatcaaacacgatgtctggggtaaagtggcaaaagtcgctaaagactctgctatcctagctaccaacacttctggtattcctatagctgacattgcggaaccttttgacccagatttccaaaaacgtttcttgggactacacttcttcaacccagtccgtgtcatgaaattggttgaaatcattaaacaccaaggaacagatgaaaaagtagtggaagacctatcccacttcacaacctacactctaggtaaaggggttgtcatctgccatgacgtcacaggatttgtgggtaaccggattggaacctttactggtatggacattgcctaccgggccgaacaagaaggccttgctgtcaaccaaaccgatgccctatctggacaagtattaggacgtcctcgtatgggaaccaaccgcctatctgactttgtcgggattgacattggctaccacgtttcccatggtcttaaagatgaccctgaagaagctgaatacttcaagcttcctcaagcacctgaatacttggttgaccaaggctggttgggtgacaagtctggccaaggtttctacaaaaaacaagaagacgggtctaaactcatctttgacctggagaaaaaagactacgttgagaaaaaagatgtggactttgacattttaaacgacctcggcaaggacttgaaacacaacttcaacactatctttgaagcagaagacgaaatcggtctcttcctatggaaaaccttgcggaacctcttcttctactctgctattaacgtgggcaaagccactgacgaatacaaaaacattgaccgagcaatggtttggggctacaactggaaagttggacccttccaagcttgggacttaatcggtgttgaacgcgtagccaaacgaattgaagaggaaattgacgacatcccaggcagtgacactgaattgcctgaatgggtgaaaggccgaactgagccattctacaaagaaggcgaaggcatttctagcgtgccagaagtggaaacttattaccacgaaaacctatggaccaatgaaggaactagtcgtttggatactactgaagacggtgtcctactccttcaaatgctaactccaaataacaccctgacccttgacttccaaaaagacatcgtcaaagcaattgatgttttagaagaggaagactacaaaggtttagtccttcacactccaggtccacacttctcttacggggctaacttgaacgacatgaaagatgccatcgaccgtggtgttgttgacactgaaacccgtgaaggaactgaaggtctccactatgcagtttctcgcatgaaatacgcttctaaaccagttgtatcagctgtatctggccgggcccttggtggtggtgctgaattactactccactccacccacgttgtagccgctgctgaatcctacattggtttagttgaagctggcgtcggcttgattccaggtggagcaggaacagttgaactcgctgaacgtatctaccgtaaaggctacaccaaacctgaacaaatcaaacacttgtcaaacctacttcaaactatcgctaccggtagtgtttctaaacacgcttacgatgctcgtcaaaaaggcttcttacgtgagactgaccaaattgttcaaaatgaagaattggttgttgctgcggcgatcgacaaagttcgctcagaaagcaaatacaactacttcccacaatacaaggctaactacagtgtcttaggtaccgactttatcgccctagcacaatccaacttagaatcttctcgcgacggtaacttcgcttctgactatgatgtcttcgttggaaccaagcttgcggaagttcttgctggtggccaagtaccagtccacactatcgttaacgaagaccagttgcttcaagtcgaagttgacaactttgttacccttagtcaagaagacaaaacttacgaccgtatcacttacatgttagaaaacaacaaaccattgcgtaactaa

SEQ ID NO: 6626 - protein, 748 aa, Alloiococcus otitidis
MGSQIAAHLVNVGLKVQLLDIVVDEDDPNKLAKEAKGRITHRKKGLLYDNELAANLSIGNFNDDLKEANDSDLYIEAVSEKLEIKHDVWGKVAKVAKDSAILATNTSGIPIADIAEPFDPDFQKRFLGLHFFNPVRVMKLVEIIKHQGTDEKVVEDLSHFTTYTLGKGVVICHDVTGFVGNRIGTFTGMDIAYRAEQEGLAVNQTDALSGQVLGRPRMGTNRLSDFVGIDIGYHVSHGLKDDPEEAEYFKLPQAPEYLVDQGWLGDKSGQGFYKKQEDGSKLIFDLEKKDYVEKKDVDFDILNDLGKDLKHNFNTIFEAEDEIGLFLWKTLRNLFFYSAINVGKATDEYKNIDRAMVWGYNWKVGPFQAWDLIGVERVAKRIEEEIDDIPGSDTELPEWVKGRTEPFYKEGEGISSVPEVETYYHENLWTNEGTSRLDTTEDGVLLLQMLTPNNTLTLDFQKDIVKAIDVLEEEDYKGLVLHTPGPHFSYGANLNDMKDAIDRGVVDTETREGTEGLHYAVSRMKYASKPVVSAVSGRALGGGAELLLHSTHVVAAAESYIGLVEAGVGLIPGGAGTVELAERIYRKGYTKPEQIKHLSNLLQTIATGSVSKHAYDARQKGFLRETDQIVQNEELVVAAAIDKVRSESKYNYFPQYKANYSVLGTDFIALAQSNLESSRDGNFASDYDVFVGTKLAEVLAGGQVPVHTIVNEDQLLQVEVDNFVTLSQEDKTYDRITYMLENNKPLRN

SEQ ID NO: 6627 - DNA, 2349 bp, Alloiococcus otitidis; identical to SEQ ID NO: 6625
  CDS (64)..(2346)

SEQ ID NO: 6628 - protein, 761 aa, Alloiococcus otitidis
MSINKVTVLGAGAMGSQIAAHLVNVGLKVQLLDIVVDEDDPNKLAKEAKGRITHRKKGLLYDNELAANLSIGNFNDDLKEANDSDLYIEAVSEKLEIKHDVWGKVAKVAKDSAILATNTSGIPIADIAEPFDPDFQKRFLGLHFFNPVRVMKLVEIIKHQGTDEKVVEDLSHFTTYTLGKGVVICHDVTGFVGNRIGTFTGMDIAYRAEQEGLAVNQTDALSGQVLGRPRMGTNRLSDFVGIDIGYHVSHGLKDDPEEAEYFKLPQAPEYLVDQGWLGDKSGQGFYKKQEDGSKLIFDLEKKDYVEKKDVDFDILNDLGKDLKHNFNTIFEAEDEIGLFLWKTLRNLFFYSAINVGKATDEYKNIDRAMVWGYNWKVGPFQAWDLIGVERVAKRIEEEIDDIPGSDTELPEWVKGRTEPFYKEGEGISSVPEVETYYHENLWTNEGTSRLDTTEDGVLLLQMLTPNNTLTLDFQKDIVKAIDVLEEEDYKGLVLHTPGPHFSYGANLNDMKDAIDRGVVDTETREGTEGLHYAVSRMKYASKPVVSAVSGRALGGGAELLLHSTHVVAAAESYIGLVEAGVGLIPGGAGTVELAERIYRKGYTKPEQIKHLSNLLQTIATGSVSKHAYDARQKGFLRETDQIVQNEELVVAAAIDKVRSESKYNYFPQYKANYSVLGTDFIALAQSNLESSRDGNFASDYDVFVGTKLAEVLAGGQVPVHTIVNEDQLLQVEVDNFVTLSQEDKTYDRITYMLENNKPLRN

SEQ ID NO: 6629 - DNA, 1356 bp, Alloiococcus otitidis
  CDS (61)..(1353)
ctatcctggcagggtttagtcagccctgccggtgttctgacaagaggaggaaatgaatttatgacctaccaagaccaataccaggaaaagaaagtcacaatcgatgaagcggcccagtccattaaggatggcgaccggatagcggctaactctgtggcagctatgccagttgacttgctcaaaaaaattgaaaatcgctacgaggaattgaacaatgttgaaatcttttcatcatttttaactactcccttccgctttttaactgaaccggaagtagcggcccatgtccactacaattcattctttgtcggtgcccttgaacgccaatatgctcagaatggattattcagtgtgacttcatttaacttttcaaatacggaagactttatcaaaaatgtggttaagcccaacgtcttcgtgacaacagccgctgccatggatgaagatggaaactttaacttgggacctatgggagttgcccaagggaagttaattgctgatgtggctgaccgggtcattatccaagtgaacaaggatgtacccccagtcaaagggaagtctaccacccttcatatcgatgatgtggacttgattttcgagcaagatgagccgctagctgaaattcccgaattagagtctggtgaaattgacaagcaaattgctagccacattttaccggaagttgaagacggatcgaccgtccaaattggggttggcggcttgtctggagctgtttcatacggtttacgtgacaagaaagacttggctgtccacactgaaatgattacccaatccatgatgacccttgccaaagaaggagttatcacaggagatatcgttggtggctttgccatggggtccaaagacttgtacaattttgctggtgaaagtgaccagatctctatcgaacccgtctatgacgtggttgacccttacaaggctggccaaaaagacaagctgatttcgatcaatgcctgcctaatggtggacattacgggtcaagttgtctctgaaggggctgggacccggattattgctgggacaggtggggccttagactttgcccgtgcagccaatatttcagaaggcggtaaaagtttcttctgtgtccggtctgtcaacaaggacaagaaaacaggtgaattgtcatccaacatcaaattcgccttaccagaagggactccagtcactatcccacgttctgaaacagactacattgcaactgaatatggtattgcccacctgaaaaaccaaagcattagtgaacgtgtccgccgtctgattgcaattgcccacccagaagtacgtgaccaactaactgaacaagcgaaaaaagttggatatatttcagagtaa

SEQ ID NO: 6630 - protein, 431 aa, Alloiococcus otitidis
MTYQDQYQEKKVTIDEAAQSIKDGDRIAANSVAAMPVDLLKKIENRYEELNNVEIFSSFLTTPFRFLTEPEVAAHVHYNSFFVGALERQYAQNGLFSVTSFNFSNTEDFIKNVVKPNVFVTTAAAMDEDGNFNLGPMGVAQGKLIADVADRVIIQVNKDVPPVKGKSTTLHIDDVDLIFEQDEPLAEIPELESGEIDKQIASHILPEVEDGSTVQIGVGGLSGAVSYGLRDKKDLAVHTEMITQSMMTLAKEGVITGDIVGGFAMGSKDLYNFAGESDQISIEPVYDVVDPYKAGQKDKLISINACLMVDITGQVVSEGAGTRIIAGTGGALDFARAANISEGGKSFFCVRSVNKDKKTGELSSNIKFALPEGTPVTIPRSETDYIATEYGIAHLKNQSISERVRRLIAIAHPEVRDQLTEQAKKVGYISE

SEQ ID NO: 6631 - DNA, 237 bp, Alloiococcus otitidis
  CDS (4)..(234)
agggtggtagacttccctttgactgggggtacatccttgttcacttggataatgacccggtcagccacatcagcaattaacttcccttgggcaactcccataggtcccaagttaaagtttccatcttcatccatggcagcggctgttgtcacgaagacgttgggcttaaccacatttttgataaagtcttccgtatttgaaaagttaaatgaagtcacactgaataatccattctga

SEQ ID NO: 6632 - protein, 77 aa, Alloiococcus otitidis
MVDFPLTGGTSLFTWIMTRSATSAINFPWATPIGPKLKFPSSSMAAAVVTKTLGLTTFLIKSSVFEKLNEVTLNNPF

SEQ ID NO: 6633 - DNA, 1215 bp, Alloiococcus otitidis
  CDS (10)..(1212)
ggaattattatggcagacaaagccgagttactcaaagagctttacccagaagataactttaatattggagacaacttaacagagggagaagtggaagttctttacgaactacgccaatccttggaaaaacaccttcgaccagttatcgatgaatactgggaaaaaggtgaaacacctttcgaacaattcaaagcagtggttaatgacgttaactacttaaaagacccccgtgtttaccaaacagaaggtcttttcaatactagtcaatactacaccttcttcctagcatatgaattgtctcgttttgacgtttccatttctaccttctctggtgtccactcaggtttaggattttacaccttcttacttggtggtaatgatgaacaacgagaacgttggtgtgaaaaaatcttggacttcgaactccagacttgtttcgccctaactgaaccagaacacggttcggacgttgctggtggtcttgaaacagtagccaaaaaagatggcgacaaatggatcttaaacggccacaagcgttggatcggtggggcaactactgctgacattatccccgtctttgccaaagatgctgacactggcgacgttaaatgtttcgtcgttgaaaaaggacaagagggtcttgaaatcgaaaaaattggcggtaaaatttctctccgtatggtcgaaaacgctgacttcaccttgaacaatgttgaagtcaaagaagaaaaccgcctgcaaaacatcaacagctttaaagatgttgcgaaagtcctttacatcactcgatcaggagttgctttctctgcaactggtatgatggctggtgccttagaagcaaccttgaaatacgtgaaagagcggaaacaattcggccgtccaattgctaaattccaattgatccaagaaaaaatcgctgtgatgaaagccaacctaactgcaagcttggccctatgtgaccaaatcgttaagcaacaagaaaaaggcaactttgacgaggtaaactcttcaatcggtaaattgtttatttctcaaagacttcgtgaatcagttgcagctggtcgtgctgcttgtggtgggaacggtattacccttgaaaaaggcattgcccgcttctttgcagatgctgaagccatcttcacttacgaaggttcttacgaaatgaacgctttaattattggccgaagcctaactggtcactctgcttttgtttaa

SEQ ID NO: 6634 - protein, 401 aa, Alloiococcus otitidis
MADKAELLKELYPEDNFNIGDNLTEGEVEVLYELRQSLEKHLRPVIDEYWEKGETPFEQFKAVVNDVNYLKDPRVYQTEGLFNTSQYYTFFLAYELSRFDVSISTFSGVHSGLGFYTFLLGGNDEQRERWCEKILDFELQTCFALTEPEHGSDVAGGLETVAKKDGDKWILNGHKRWIGGATTADIIPVFAKDADTGDVKCFVVEKGQEGLEIEKIGGKISLRMVENADFTLNNVEVKEENRLQNINSFKDVAKVLYITRSGVAFSATGMMAGALEATLKYVKERKQFGRPIAKFQLIQEKIAVMKANLTASLALCDQIVKQQEKGNFDEVNSSIGKLFISQRLRESVAAGRAACGGNGITLEKGIARFFADAEAIFTYEGSYEMNALIIGRSLTGHSAFV

SEQ ID NO: 6635 - DNA, 1305 bp, Alloiococcus otitidis
  CDS (73)..(1302)
gaattgggagatttgttcatgctaaaaaaagctttattaatcctagcagctggtttgttaaccgcctgctccatgtatactgttgatgaggaagaccaagaagagacgagccaagaagaagctagtcaagagaagggcagtcaaggggaaggccaggacagtgaagaggacgctaatgacttggcttttgtcttgcaagagtcggaccgcttagctcaagtgtccccctttaacgatgatgcccttgccttcttatctgagcaggtagaagcagatgaagacggggagattggagaagttggcgaattaaccctggactactctggtatctacctcagtgcagaggaagaactgtacggggtttacctcctgactaaccgactgaacttggacatgaccaacctgtcttttgaagttacccactacaattctgcaggccaggcagtcttggaagactaccccctctacttaggcaaggacatgtttggcgtcttagaacaagggactgccatgccggtttatatcgaactccccttggatgatactgaagccatagaaggagaaggctttcaggagggagagatcactttagccaatttgaactttgatactgaagaggacttgatagacgggctggaagaggaagaagtagccgatgatgaccaggaagaagaggttgacgaccaagaagatcaaacacctgaaggctacaatgtgggctacaaccctacttatgtaatgactgttcgccagcaggaagaattactggctgatattgaaagtggggacgtaccagaccttgctgtcactactccacccattattgccaatgacccacaaggcgacgatatcatggccatggtccaagatgaaaatatcgtcaacccagctgccggtttttcactggatggccagctaaccctttactggaccgggatcgcaacaggtaactatgagacaaccatcttcatgttagctaaccggaccgaccaggcctacagcgactttgacttgaccctagactttgccaacagtgacgaccaagtcatactagaccaggaagaaatccacttgtctgctgaagattatggggaagtagaagccaatagcttgacccctattttggttgacattccggaagattcacgtcctgcccttgagcgactattagacccagaagaagccttggctccccaatatgaacttgtcgatagtcctgaccaaggcggggagtcagatgagggtcaggaagacgataatgaccaagaagaggaagaccaagcagaccaggaagcagataattaa

SEQ ID NO: 6636 - protein, 410 aa, Alloiococcus otitidis
MYTVDEEDQEETSQEEASQEKGSQGEGQDSEEDANDLAFVLQESDRLAQVSPFNDDALAFLSEQVEADEDGEIGEVGELTLDYSGIYLSAEEELYGVYLLTNRLNLDMTNLSFEVTHYNSAGQAVLEDYPLYLGKDMFGVLEQGTAMPVYIELPLDDTEAIEGEGFQEGEITLANLNFDTEEDLIDGLEEEEVADDDQEEEVDDQEDQTPEGYNVGYNPTYVMTVRQQEELLADIESGDVPDLAVTTPPIIANDPQGDDIMAMVQDENIVNPAAGFSLDGQLTLYWTGIATGNYETTIFMLANRTDQAYSDFDLTLDFANSDDQVILDQEEIHLSAEDYGEVEANSLTPILVDIPEDSRPALERLLDPEEALAPQYELVDSPDQGGESDEGQEDDNDQEEEDQADQEADN

SEQ ID NO: 6637 - DNA, 1305 bp, Alloiococcus otitidis; identical to SEQ ID NO: 6635
  CDS (19)..(1302)

SEQ ID NO: 6638 - protein, 428 aa, Alloiococcus otitidis
MLKKALLILAAGLLTACSMYTVDEEDQEETSQEEASQEKGSQGEGQDSEEDANDLAFVLQESDRLAQVSPFNDDALAFLSEQVEADEDGEIGEVGELTLDYSGIYLSAEEELYGVYLLTNRLNLDMTNLSFEVTHYNSAGQAVLEDYPLYLGKDMFGVLEQGTAMPVYIELPLDDTEAIEGEGFQEGEITLANLNFDTEEDLIDGLEEEEVADDDQEEEVDDQEDQTPEGYNVGYNPTYVMTVRQQEELLADIESGDVPDLAVTTPPIIANDPQGDDIMAMVQDENIVNPAAGFSLDGQLTLYWTGIATGNYETTIFMLANRTDQAYSDFDLTLDFANSDDQVILDQEEIHLSAEDYGEVEANSLTPILVDIPEDSRPALERLLDPEEALAPQYELVDSPDQGGESDEGQEDDNDQEEEDQADQEADN

SEQ ID NO: 6639 - DNA, 1305 bp, Alloiococcus otitidis; identical to SEQ ID NO: 6635
  CDS (4)..(1302)

SEQ ID NO: 6640 - protein, 433 aa, Alloiococcus otitidis
MGDLFMLKKALLILAAGLLTACSMYTVDEEDQEETSQEEASQEKGSQGEGQDSEEDANDLAFVLQESDRLAQVSPFNDDALAFLSEQVEADEDGEIGEVGELTLDYSGIYLSAEEELYGVYLLTNRLNLDMTNLSFEVTHYNSAGQAVLEDYPLYLGKDMFGVLEQGTAMPVYIELPLDDTEAIEGEGFQEGEITLANLNFDTEEDLIDGLEEEEVADDDQEEEVDDQEDQTPEGYNVGYNPTYVMTVRQQEELLADIESGDVPDLAVTTPPIIANDPQGDDIMAMVQDENIVNPAAGFSLDGQLTLYWTGIATGNYETTIFMLANRTDQAYSDFDLTLDFANSDDQVILDQEEIHLSAEDYGEVEANSLTPILVDIPEDSRPALERLLDPEEALAPQYELVDSPDQGGESDEGQEDDNDQEEEDQADQEADN

SEQ ID NO: 6641 - DNA, 1998 bp, Alloiococcus otitidis
  CDS (454)..(1995)
acgttgcccacaacttgtagactaaaacaggaggctattttaatgagcaaatctcactattttaagaagctatcgctaattttttcttcagcgcttgtcctagcagcttgccaaccgaatgaaggtgaagttgaagatactgaagctgagactagtcaagaggcagaagaagacagtcaggatgaaactgctggtgaagaaaatggtggccaagatgaagaggaagaatctgattctgaaggcggcgaagattcagaagatggcgaagaggactcagaagatgacggcgaatctgacgacgattcagatgatgactcagaagatggcaatggagaagagagtgacgtggctggcgttgaattatccgacgaaaagccagaagtagcagaagttgaagacaacaacgctcctaaccgtatcatcactagctttaacggagactcccaaacccaaatgggctttaactggtacactaccgaagcctttgatgatgctaaagtttgggtttcgaccgaagaagacctaagcgatgcccaagaatttgaagctgaagtggagcaagtcactaaccgctacggtgagcggactgaagatggccactttatttttgctgatgtggagcttgacgatgaaggggaaccggttgaagaagacggcgaacctgttattaatggctactacaccgatgaaaatatcgatgtcgaaaacaaagactggactggtggcgaagttggtcaattagaattaattgacgtcgacgaacatgtctacaaggctgtagcaactgatttagaacccggaacaacttactactaccaagtcggatctgaagaaggggagaaaagtgaagtcggaagttttaaaacttctggtggcgatgatgattcctttaccttcattcaatacacagacacccaaaacgcctactggaatgaacatgttcgcaatgaagcgtcatttggggctgacactatcgcaaaagcattagaaacagttgaagacccagactttgtggtccactcaggtgacgtggtggagattgctgaagtggaagatgaatgggttgacctcttcacccaatcagaagaatccttcttgcaaattcctttcattgttgcaccaggtaaccacgatgaatatgcccttgcctatgatgacgacatgctaacagaggccttcaaccagcacattaacgtgccagcagccaacgatgccattgacggtgggtcatactactcggtcacctacaacaatgcccacattgttacattgaacactaacgacaacaaggaatcggacgacaaccctgacggaaaagctattggtgatgaacaattggcgtggatcgaagaagatatcaaccaagcccgagaaaatggggctgagtggattatcttgaactaccacaagccgctcttctctaaatcctaccactccctccaagatgaggatgtgcagttagtcagagaagaattcatggaattaattgaccgcttagacgtcgatctggcccttcaaggtcacgaccacgttatttcccaaaccaaacccctaacctttgttccaagtgatgtcagcttctcaaatgcggaagttgatgaagaatccattactgaagaagatggagtgaagacctacaccaaccctgaggggacagtctttgtcctaccaaacaatggggggaccaaggcttacgacgacatctacagcaaaaatatcgaccgccttcacgaagtccgacctaaattggactggttgacagaagaagacgtggaatactggaacaacctctttgaatttggcgaacagccacaggatgctccagaatttgaagactcccactccaacgcccgtgactctgctattcaaaactttgcggtttacactgtcgaaagcaaccgaattgctgttgaaatttaccaaatcgaaggtgaattgcttgaaggggaagaccgtaatgttgaactagcccacgaatttgaaattaccaaagactaa

SEQ ID NO: 6642 - protein, 514 aa, Alloiococcus otitidis
MGFNWYTTEAFDDAKVWVSTEEDLSDAQEFEAEVEQVTNRYGERTEDGHFIFADVELDDEGEPVEEDGEPVINGYYTDENIDVENKDWTGGEVGQLELIDVDEHVYKAVATDLEPGTTYYYQVGSEEGEKSEVGSFKTSGGDDDSFTFIQYTDTQNAYWNEHVRNEASFGADTIAKALETVEDPDFVVHSGDVVEIAEVEDEWVDLFTQSEESFLQIPFIVAPGNHDEYALAYDDDMLTEAFNQHINVPAANDAIDGGSYYSVTYNNAHIVTLNTNDNKESDDNPDGKAIGDEQLAWIEEDINQARENGAEWIILNYHKPLFSKSYHSLQDEDVQLVREEFMELIDRLDVDLALQGHDHVISQTKPLTFVPSDVSFSNAEVDEESITEEDGVKTYTNPEGTVFVLPNNGGTKAYDDIYSKNIDRLHEVRPKLDWLTEEDVEYWNNLFEFGEQPQDAPEFEDSHSNARDSAIQNFAVYTVESNRIAVEIYQIEGELLEGEDRNVELAHEFEITKD

SEQ ID NO: 6643 - DNA, 1998 bp, Alloiococcus otitidis; identical to SEQ ID NO: 6641
  CDS (4)..(1995)

SEQ ID NO: 6644 - protein, 664 aa, Alloiococcus otitidis
MPTTCRLKQEAILMSKSHYFKKLSLIFSSALVLAACQPNEGEVEDTEAETSQEAEEDSQDETAGEENGGQDEEEESDSEGGEDSEDGEEDSEDDGESDDDSDDDSEDGNGEESDVAGVELSDEKPEVAEVEDNNAPNRIITSFNGDSQTQMGFNWYTTEAFDDAKVWVSTEEDLSDAQEFEAEVEQVTNRYGERTEDGHFIFADVELDDEGEPVEEDGEPVINGYYTDENIDVENKDWTGGEVGQLELIDVDEHVYKAVATDLEPGTTYYYQVGSEEGEKSEVGSFKTSGGDDDSFTFIQYTDTQNAYWNEHVRNEASFGADTIAKALETVEDPDFVVHSGDVVEIAEVEDEWVDLFTQSEESFLQIPFIVAPGNHDEYALAYDDDMLTEAFNQHINVPAANDAIDGGSYYSVTYNNAHIVTLNTNDNKESDDNPDGKAIGDEQLAWIEEDINQARENGAEWIILNYHKPLFSKSYHSLQDEDVQLVREEFMELIDRLDVDLALQGHDHVISQTKPLTFVPSDVSFSNAEVDEESITEEDGVKTYTNPEGTVFVLPNNGGTKAYDDIYSKNIDRLHEVRPKLDWLTEEDVEYWNNLFEFGEQPQDAPEFEDSHSNARDSAIQNFAVYTVESNRIAVEIYQIEGELLEGEDRNVELAHEFEITKD

SEQ ID NO: 6645 - DNA, 1998 bp, Alloiococcus otitidis; identical to SEQ ID NO: 6641
  CDS (43)..(1995)

SEQ ID NO: 6646 - protein, 651 aa, Alloiococcus otitidis
MSKSHYFKKLSLIFSSALVLAACQPNEGEVEDTEAETSQEAEEDSQDETAGEENGGQDEEEESDSEGGEDSEDGEEDSEDDGESDDDSDDDSEDGNGEESDVAGVELSDEKPEVAEVEDNNAPNRIITSFNGDSQTQMGFNWYTTEAFDDAKVWVSTEEDLSDAQEFEAEVEQVTNRYGERTEDGHFIFADVELDDEGEPVEEDGEPVINGYYTDENIDVENKDWTGGEVGQLELIDVDEHVYKAVATDLEPGTTYYYQVGSEEGEKSEVGSFKTSGGDDDSFTFIQYTDTQNAYWNEHVRNEASFGADTIAKALETVEDPDFVVHSGDVVEIAEVEDEWVDLFTQSEESFLQIPFIVAPGNHDEYALAYDDDMLTEAFNQHINVPAANDAIDGGSYYSVTYNNAHIVTLNTNDNKESDDNPDGKAIGDEQLAWIEEDINQARENGAEWIILNYHKPLFSKSYHSLQDEDVQLVREEFMELIDRLDVDLALQGHDHVISQTKPLTFVPSDVSFSNAEVDEESITEEDGVKTYTNPEGTVFVLPNNGGTKAYDDIYSKNIDRLHEVRPKLDWLTEEDVEYWNNLFEFGEQPQDAPEFEDSHSNARDSAIQNFAVYTVESNRIAVEIYQIEGELLEGEDRNVELAHEFEITKD

SEQ ID NO: 6647 - DNA, 267 bp, Alloiococcus otitidis
  CDS (64)..(264)
atgaaggtgaagttgaagatactgaagctgagactagtcaagaggcagaagaagacagtcaggatgaaactgctggtgaagaaaatggtggccaagatgaagaggaagaatctgattctgaaggcggcgaagattcagaagatggcgaagaggactcagaagatgacggcgaatctgacgacgattcagatgatgactcagaagatggcaatggagaagagagtgacgtggctggcgttgaattatccgacgaaaagccagaagtag

SEQ ID NO: 6648 - protein, 67 aa, Alloiococcus otitidis
MKLLVKKMVAKMKRKNLILKAAKIQKMAKRTQKMTANLTTIQMMTQKMAMEKRVTWLALNYPTKSQK

SEQ ID NO: 6649 - DNA, 396 bp, Alloiococcus otitidis
  CDS (151)..(393)
cggttagtgacttgctccacttcagcttcaaattcttgggcatcgcttaggtcttcttcggtcgaaacccaaactttagcatcatcaaaggcttcggtagtgtaccagttaaagcccatttgggtttgggagtctccgttaaagctagtgatgatacggttaggagcgttgttgtcttcaacttctgctacttctggcttttcgtcggataattcaacgccagccacgtcactctcttctccattgccatcttctgagtcatcatctgaatcgtcgtcagattcgccgtcatcttctgagtcctcttcgccatcttctgaatcttcgccgccttcagaatcagattcttcctcttcatcttggccaccattttcttcaccagcagtttcatcctga

SEQ ID NO: 6650 - protein, 81 aa, Alloiococcus otitidis
MIRLGALLSSTSATSGFSSDNSTPATSLSSPLPSSESSSESSSDSPSSSESSSPSSESSPPSESDSSSSSWPPFSSPAVSS
